(19) United States
(12) Patent Application Publication
(10) Pub. No.: US 2021/0171977 A1
(43) Pub. Date: Jun. 10, 2021

(54) SYNTHETIC PROMOTERS

(71) Applicant: Massachusetts Institute of Technology, Cambridge, MA (US)

(72) Inventors: Timothy Kuan-Ta Lu, Cambridge, MA (US); Lior Nissim, Cambridge, MA (US); Ming-Ru Wu, Brookline, MA (US)

(73) Assignee: Massachusetts Institute of Technology, Cambridge, MA (US)

(21) Appl. No.: 16/493,340

(22) PCT Filed: Mar. 13, 2018
(86) PCT No.: PCT/US2018/022093

§ 371 Date: Sep. 12, 2019

Related U.S. Application Data
(60) Provisional application No. 62/470,754, filed on Mar. 13, 2017.

(51) Int. Cl. C12N 15/85; C12N 15/86; A61K 35/763

(52) U.S. Cl. CPC C12N 15/85; C12N 15/86; C12N 2710/16643; C12N 2830/008; C12N 2710/16632; A61K 35/763

(57) ABSTRACT

Aspects of the present disclosure provide synthetic promoters that are differentially modulated between certain diseased cells (e.g., cancer cells) and normal cells (e.g., non-cancer cells). These synthetic promoters are useful, for example, for targeted expression of therapeutic molecules in diseased cells.

### RELATED APPLICATION

[0001] This application is a national stage filing under 35 U.S.C. § 371 of International Patent Application Ser. No. PCT/US2018/022093, filed Mar. 13, 2018, which claims the benefit under 35 U.S.C. § 119(e) of U.S. provisional application No. 62/470,754, filed Mar. 13, 2017, the contents of each of which is incorporated by reference herein in its entirety.

### FEDERALLY SPONSORED RESEARCH

[0002] This invention was made with Government support under Grant No. W911NF-11-2-0056 awarded by the Army Research Office and under Grant No. P50 GM098792 awarded by the National Institutes of Health. The Government has certain rights in the invention.

### SEQUENCE LISTING

[0003] The Sequence Listing named M065670406US01-SEQ-ZJG having a size of 4.68 MB created Sep. 12, 2019 is incorporated herein by reference in its entirety.

### BACKGROUND

[0004] Targeted therapy is useful for treating a myriad of different diseases. Cell type-specific and/or cellular state-specific control of gene expression enables, for example, targeted delivery of therapeutic proteins to diseased cells (e.g., cancer cells) without adversely affecting healthy, non-diseased cells.

### SUMMARY

[0005] Some aspects of the present disclosure provide synthetic promoters that have differential activities in different cell types and/or different cellular states. The synthetic promoters may be used to drive expression of gene(s) of interest in a specific cell type or during a specific cellular state. In some embodiments, a synthetic promoter is used for diagnostic purposes to drive the expression of a detectable molecule (e.g., a fluorescent protein such as GFP) in a specific cell type or at a specific cellular state. In some embodiments, a synthetic promoter is used for therapeutic purposes to drive the expression of a therapeutic molecule (e.g., a protein, such as an antibody, or a nucleic acid, such as a siRNA) in a specific cell type (e.g., a cancer cell) or during a specific cellular state.

[0006] Thus, provided herein are engineered nucleic acids comprising a promoter that comprises the following consensus sequence: TFBS-AGA-TFBS- TCG-TFBS-GAC-TFBS-CTA-TFBS-ACT-TFBS-TGC-TFBS-GTA-TFBS, wherein TFBS is a transcription factor binding site sequence of Table 5. In some embodiments, the activity of the promoter is increased in diseased cells relative to healthy cells. In some embodiments, the activity of the promoter is decreased in diseased cells relative to healthy cells.

[0007] In some embodiments, the diseased cells are selected from breast cancer cells, colon cancer cells, and ovarian cancer cells.

[0008] In some embodiments, the promoter is operably linked to a nucleotide sequence encoding a therapeutic protein.

[0009] In some embodiments, the transcription factor binding site sequence comprises the following sequence: CCACGTGC (SEQ ID NO: 12265). In some embodiments, the promoter comprises the following sequence:

(SEQ ID NO: 12266)
CCACGTGCAGACCACGTGCTCGCCACGTGCGACCCACGTGCCTACCACGT
GCACTCCACGTGCTGCCCACGTGCGTACCACGTGCG.

[0010] In some embodiments, the transcription factor binding site sequence comprises the following sequence: TGCTGAGTCAGCA (SEQ ID NO: 12267). In some embodiments, the promoter comprises the following sequence:

(SEQ ID NO: 12268)
TGCTGAGTCAGCAAGATGCTGAGTCAGCATCGTGCTGAGTCAGCAGACTG
CTGAGTCAGCACTATGCTGAGTCAGCAACTTGCTGAGTCAGCATGCTGCT
GAGTCAGCAGTATGCTGAGTCAGCAG.

[0011] Also provided herein are cells comprising an engineered nucleic acid described herein.

[0012] Further provided herein are viruses, such as lentiviruses, adenoviruses, adeno-associated viruses, and/or oncolytic viruses comprising an engineered nucleic acid described herein. In some embodiments, the oncolytic virus is an oncolytic herpes simplex virus.

[0013] The present disclosure also provides methods of delivering to a cell, optionally in a subject, an engineered nucleic acid or an oncolytic virus described herein.

[0014] In some embodiments, the engineered nucleic acids comprise a promoter that comprises a nucleotide sequence identified by any one of SEQ ID NOs: 1-12263. In some embodiments, the activity of the promoter is increased in diseased cells (e.g., ovarian cancer cells or breast cancer cells) relative to healthy cells. In some embodiments, the activity of the promoter is decreased in diseased cells relative to healthy cells. SEQ ID NOs: 1-12263 include the sequence ATCATCTCACCTTGCCTCCTG (SEQ ID NO: 12264), used to amplify promoters of interest directly from the promoter library. It will be understood that “a promoter that comprises the nucleotide sequence identified by any one of SEQ ID NOS: 1-12263,” in some embodiments, does not include the 5′ SEQ ID NO: 12264. Thus, SEQ ID NO: 12264 may be excluded from any one of SEQ ID NOs. 1-12263.

[0015] Also provided herein are cells comprising engineered nucleic acids that include a synthetic promoter having a nucleotide sequence identified by any one of SEQ ID NOS: 1-12263.

[0016] The present disclosure also provide delivering to a cell or delivering to a subject (e.g., directly or via a cell) an engineered nucleic acid that includes a synthetic promoter having a nucleotide sequence identified by any one of SEQ ID NOS: 1-12263.

[0017] The entire disclosure of Nissim, L. et al. Cell 2017; 171: 1138-1150 is incorporated herein by reference.

### BRIEF DESCRIPTION OF THE DRAWINGS

[0018] The accompanying drawings are not intended to be drawn to scale. For purposes of clarity, not every component may be labeled in every drawing.

[0019] FIG. 1 is a graph showing the activities of synthetic promoters in four different cell lines: HCT, MDA-453, MCF-7, and MCF-10A.

[0020] FIG. 2 is a graph showing the activities of synthetic promoters in eight different cell lines: OVCAR8, MDA-453, MDA-231, HCT, aHDF, CCD, 12A, and 10A.

[0021] FIG. 3 is a graph showing the activities of synthetic promoters in four cell lines: OVCAR8, IOSE385, IOSE386, and IOSE120.

[0022] FIG. 4 is a graph showing the activities of synthetic promoters in eight different cell lines: OVCAR8, IOSE385, IOSE386, IOSE120, aHDF, CCD, 12A, 10A, HEK, and NB508.

[0023] FIG. 5 is a graph showing the activities of synthetic promoters in four different cell lines: OVCAR8, HEK293T, NB508, and 4T1.

[0024] FIG. 6 is a graph showing the activities of synthetic promoters in eight different cell lines: OVCAR8, IOSE385, IOSE386, IOSE120, aHDF, CCD, MCF10A, and MCF12A.

[0025] FIG. 7 is a graph showing the activities of synthetic promoters in four different cell lines: OVCAR8, IOSE386, IOSE120, 12A, and 10A.

[0026] FIG. 8 is a graph showing the activities of synthetic promoters in three different cell lines: NB508, 4T1, and OVCAR8.

[0027] FIG. 9 is a graph showing the activities of synthetic promoters in two different cell lines: 10A and MDA.

[0028] FIG. 10 is a graph showing the activities of synthetic promoters in two different cell lines: 10A and MDA.

### DETAILED DESCRIPTION

[0029] Provided herein are synthetic promoters that are differentially modulated among various diseased cell types, relative to healthy (normal), non-diseased cell types. These synthetic promoters may be used for targeted expression of molecules/products of interest (e.g., therapeutic and/or diagnostic molecules) in select cell types (e.g., cancer cells or other diseased cells).

### Synthetic Promoters

[0030] A “promoter” refers to a control region of a nucleic acid sequence at which initiation and rate of transcription of the remainder of a nucleic acid sequence are controlled. A promoter regulates (e.g., activates or represses) expression or transcription of the nucleic acid sequence that it is operably linked to. A promoter may also contain sub-regions at which regulatory proteins and molecules may bind, such as RNA polymerase and other transcription factors. Promoters may be constitutive, inducible, activatable, repressible, tissue-specific, cell type-specific, cell state-specific, or any combination thereof.

[0031] Promoters of the present disclosure are synthetic promoters. A synthetic promoters is a promoter that is not “naturally occurring.” The synthetic promoters of the present disclosure may be produced synthetically (e.g., via chemical synthesis), or using recombinant cloning and/or nucleic acid amplification technology, including polymerase chain reaction (PCR) (see U.S. Pat. Nos. 4,683,202 and 5,928,906).

[0032] In some embodiments, a synthetic promoter may be 10-300 nucleotides long. For example, the length of a synthetic promoter may be 10-300, 10-290, 10-280, 10-270, 10-260, 10-250, 10-240, 10-230, 10-220, 10-210, 10-210, 10-200, 10-190, 10-180, 10-170, 10-160, 10-150, 10-140, 10-130, 10-120, 10-110, 10-100, 10-90, 10-80, 10-70, 10-60, 10-50, 10-40, 10-30, 10-20, 20-300, 20-290, 20-280, 20-270, 20-260, 20-250, 20-240, 20-230, 20-220, 20-210, 20-210, 20-200, 20-190, 20-180, 20-170, 20-160, 20-150, 20-140, 20-130, 20-120, 20-110, 20-100, 20-90, 20-80, 20-70, 20-60, 20-50, 20-40, 20-30, 30-300, 30-290, 30-280, 30-270, 30-260, 30-250, 30-240, 30-230, 30-220, 30-210, 30-210, 30-200, 30-190, 30-180, 30-170, 30-160, 30-150, 30-140, 30-130, 30-120, 30-110, 30-100, 30-90, 30-80, 30-70, 30-60, 30-50, 30-40, 40-300, 40-290, 40-280, 40-270, 40-260, 40-250, 40-240, 40-230, 40-220, 40-210, 40-210, 40-200, 40-190, 40-180, 40-170, 40-160, 40-150, 40-140, 40-130, 40-120, 40-110, 40-100, 40-90, 40-80, 40-70, 40-60, 40-50, 50-300, 50-290, 50-280, 50-270, 50-260, 50-250, 50-240, 50-230, 50-220, 50-210, 50-210, 50-200, 50-190, 50-180, 50-170, 50-160, 50-150, 50-140, 50-130, 50-120, 50-110, 50-100, 50-90, 50-80, 50-70, 50-60, 60-300, 60-290, 60-280, 60-270, 60-260, 60-250, 60-240, 60-230, 60-220, 60-210, 60-210, 60-200, 60-190, 60-180, 60-170, 60-160, 60-150, 60-140, 60-130, 60-120, 60-110, 60-100, 60-90, 60-80, 60-70, 70-300, 70-290, 70-280, 70-270, 70-260, 70-250, 70-240, 70-230, 70-220, 70-210, 70-210, 70-200, 70-190, 70-180, 70-170, 70-160, 70-150, 70-140, 70-130, 70-120, 70-110, 70-100, 70-90, 70-80, 80-300, 80-290, 80-280, 80-270, 80-260, 80-250, 80-240, 80-230, 80-220, 80-210, 80-210, 80-200, 80-190, 80-180, 80-170, 80-160, 80-150, 80-140, 80-130, 80-120, 80-110, 80-100, 80-90, 90-300, 90-290, 90-280, 90-270, 90-260, 90-250, 90-240, 90-230, 90-220, 90-210, 90-210, 90-200, 90-190, 90-180, 90-170, 90-160, 90-150, 90-140, 90-130, 90-120, 90-110, 90-100, 100-300, 100-290, 100-280, 100-270, 100-260, 100-250, 100-240, 100-230, 100-220, 100-210, 100-210, 100-200, 100-190, 100-180, 100-170, 100-160, 100-150, 100-140, 100-130, 100-120, 100-110, 110-300, 110-290, 110-280, 110-270, 110-260, 110-250, 110-240, 110-230, 110-220, 110-210, 110-210, 110-200, 110-190, 110-180, 110-170, 110-160, 110-150, 110-140, 110-130, 110-120, 120-300, 120-290, 120-280, 120-270, 120-260, 120-250, 120-240, 120-230, 120-220, 120-210, 120-210, 120-200, 120-190, 120-180, 120-170, 120-160, 120-150, 120-140, 120-130, 130-300, 130-290, 130-280, 130-270, 130-260, 130-250, 130-240, 130-230, 130-220, 130-210, 130-210, 130-200, 130-190, 130-180, 130-170, 130-160, 130-150, 130-140, 140-300, 140-290, 140-280, 140-270, 140-260, 140-250, 140-240, 140-230, 140-220, 140-210, 140-210, 140-200, 140-190, 140-180, 140-170, 140-160, 140-150, 150-300, 150-290, 150-280, 150-270, 150-260, 150-250, 150-240, 150-230, 150-220, 150-210, 150-210, 150-200, 150-190, 150-180, 150-170, 150-160, 160-300, 160-290, 160-280, 160-270, 160-260, 160-250, 160-240, 160-230, 160-220, 160-210, 160-210, 160-200, 160-190, 160-180, 160-170, 170-300, 170-290, 170-280, 170-270, 170-260, 170-250, 170-240, 170-230, 170-220, 170-210, 170-210, 170-200, 170-190, 170-180, 180-300, 180-290, 180-280, 180-270, 180-260, 180-250, 180-240, 180-230, 180-220, 180-210, 180-210, 180-200, 180-190, 190-300, 190-290, 190-280, 190-270, 190-260, 190-250, 190-240, 190-230, 190-220, 190-210, 190-210, 190-200, 200-300, 200-290, 200-280, 200-270, 200-260, 200-250, 200-240, 200-230, 200-220, 200-210, 200-210, 210-300, 210-290, 210-280, 210-270, 210-260, 210-250, 210-240, 210-230, 210-220, 220-300, 220-290, 220-280, 220-270, 220-260, 220-250, 220-240, 220-230, 230-300, 230-290, 230-280, 230-270, 230-260, 230-250, 230-240, 240-300, 240-290, 240-280, 240-270, 240-260, 240-250, 250-300, 250-290, 250-280, 250-270, 250-260, 260-300, 260-290, 260-280, 260-270, 270-300, 270-290, 270-280, 280-300, 280-290, or 290-300 nucleotides. Promoters may be longer than 300 nucleotides, in some embodiments. In some embodiments, a synthetic promoter may be longer than 300 nucleotide (e.g., 300, 350, 400, 450, or 500 nucleotides long or longer).

[0033] In some embodiments, the length of a synthetic promoter is 200 nucleotides or shorter. In some embodiments, a synthetic promoter may be 10, 11, 12, 13, 14, 15, 16, 17, 18, 19, 20, 21, 22, 23, 24, 25, 26, 27, 28, 29, 30, 31, 32, 33, 34, 35, 36, 37, 38, 39, 40, 41, 42, 43, 44, 45, 46, 47, 48, 49, 50, 51, 52, 53, 54, 55, 56, 57, 58, 59, 60, 61, 62, 63, 64, 65, 66, 67, 68, 69, 70, 71, 72, 73, 74, 75, 76, 77, 78, 79, 80, 81, 82, 83, 84, 85, 86, 87, 88, 89, 90, 91, 92, 93, 94, 95, 96, 97, 98, 99, 100, 101, 102, 103, 104, 105, 106, 107, 108, 109, 110, 111, 112, 113, 114, 115, 116, 117, 118, 119, 120, 121, 122, 123, 124, 125, 126, 127, 128, 129, 130, 131, 132, 133, 134, 135, 136, 137, 138, 139, 140, 141, 142, 143, 144, 145, 146, 147, 148, 149, 150, 151, 152, 153, 154, 155, 156, 157, 158, 159, 160, 161, 162, 163, 164, 165, 166, 167, 168, 169, 170, 171, 172, 173, 174, 175, 176, 177, 178, 179, 180, 181, 182, 183, 184, 185, 186, 187, 188, 189, 190, 191, 192, 193, 194, 195, 196, 197, 198, 199, or 200 nucleotides long.

[0034] In some embodiments, a synthetic promoter comprises the nucleotide sequence identified by any one of SEQ ID NOs: 1-12263 (with or without the 5′ sequence identified by SEQ ID NO: 12264). In some embodiments, a synthetic promoter comprises a nucleotide sequence that is at least 95% identical to the nucleotide sequence identified by any one of SEQ ID NOs: 1-12263 (with or without the 5′ sequence identified by SEQ ID NO: 12264), and is able to regulate the expression (e.g., activate or repress) the sequence to which it is operably linked. For example, a synthetic promoter may comprise a nucleotide sequence that is at least 95%, at least 96%, at least 97%, at least 98%, at least 99%, or at least 99.5% identical to the nucleotide sequence identified by any one of SEQ ID NOs: 1-12263 (with or without the 5′ sequence identified by SEQ ID NO: 12264), and is able to regulate the expression (e.g., activate or repress) the sequence to which it is operably linked. In some embodiments, a synthetic promoter comprises a nucleotide sequence that is 95-99% identical to the nucleotide sequence identified by any one of SEQ ID NOs: 1-12263 (with or without the 5′ sequence identified by SEQ ID NO: 12264), and is able to regulate the expression (e.g., activate or repress) the sequence to which it is operably linked. In some embodiments, a synthetic promoter comprises a nucleotide sequence that is 95%-99%, 95%-98%, 95%-97%, 95%-96%, 96%-99%, 96%-98%, 96%-97%, 97%-99%, 97%-98%, or 98%-99% identical to the nucleotide sequence identified by any one of SEQ ID NOs: 1-12263 (with or without the 5′ sequence identified by SEQ ID NO: 12264), and is able to regulate the expression (e.g., activate or repress) the sequence to which it is operably linked. In some embodiments, a synthetic promoter may comprise a nucleotide sequence that is 95%, 96%, 97%, 98%, 99%, or 99.5% identical to the nucleotide sequence identified by any one of SEQ ID NOs: 1-12263 (with or without the 5′ sequence identified by SEQ ID NO: 12264), and is able to regulate the expression (e.g., activate or repress) the sequence to which it is operably linked.

[0035] Other aspects of the present disclosure provide synthetic promoters having differential activities in different cell lines or different cellular states. “Having differential activities” means the activity of a synthetic promoter is higher or lower in one type of cell or at a cellular state, compare to in a different type of cell or at a different cellular state, respectfully. In some embodiments, the activity of a synthetic promoter in one cell type or a cellular state is different from (higher or lower) the activity of the synthetic promoter in another cell type or another cellular state by at least 10% (e.g., at least 10%, 20%, 30%, 40%, 50%, 60%, 70%, 80%, 90% 100%, 2-fold, 3-fold, 4-fold, 5-fold, 6-fold, 7-fold, 8 -fold, 9-fold, 10-fold, 20-fold, 30-fold, 40-fold, 50-fold, 60-fold, 70-fold, 80-fold, 90-fold, 100-fold, 500-fold, or 1000-fold). In some embodiments, the activity of a synthetic promoter in one cell type or a cellular state is different from (higher or lower) the activity of the synthetic promoter in another cell type or another cellular state by 10%-100%. For example, the activity of a synthetic promoter in one cell type or a cellular state may be different from (higher or lower) the activity of the synthetic promoter in another cell type or another cellular state by 10%-100%, 10%-90%, 10%-80%, 10%-70%, 10%-60%, 10%-50%, 10%-40%, 10%-30%, 10%-20%, 20%-100%, 20%-90%, 20%-80%, 20%-70%, 20%-60%, 20%-50%, 20%-40%, 20%-30%, 30%-100%, 30%-90%, 30%-80%, 30%-70%, 30%-60%, 30%-50%, 30%-40%, 40%-100%, 40%-90%, 40%-80%, 40%-70%, 40%-60%, 40%-50%, 50%-100%, 50%-90%, 50%-80%, 50%-70%, 50%-60%, 60%-100%, 60%-90%, 60%-80%, 60%-70%, 70%-100%, 70%-90%, 70%-80%, 80%-100%, 80%-90%, or 90%-100%. In some embodiments, the activity of a synthetic promoter in one cell type or a cellular state is different from (higher or lower) the activity of the synthetic promoter in another cell type or another cellular state by 1-1000 fold. For example, the activity of a synthetic promoter in one cell type or a cellular state may be different from (higher or lower than) the activity of the synthetic promoter in another cell type or another cellular state by 1-1000, 1-900, 1-800, 1-700, 1-600, 1-500, 1-400, 1-300, 1-200, 1-100, 1-90, 1-80, 1-70, 1-60, 1-50, 1-40, 1-30, 1-20, 1-10, 1-9, 1-8, 1-7, 1-6, 1-5, 1-4, 1-3, 1-2, 5-1000, 5-900, 5-800, 5-700, 5-600, 5-500, 5-400, 5-300, 5-200, 5-100, 5-90, 5-80, 5-70, 5-60, 5-50, 5-40, 5-30, 5-20, 5-10, 5-9, 5-8, 5-7, 5-6, 10-1000, 10-900, 10-800, 10-700, 10-600, 10-500, 10-400, 10-300, 10-200, 10-100, 10-90, 10-80, 10-70, 10-60, 10-50, 10-40, 10-30, 10-20, 20-1000, 20-900, 20-800, 20-700, 20-600, 20-500, 20-400, 20-300, 20-200, 20-100, 20-90, 20-80, 20-70, 20-60, 20-50, 20-40, 20-30, 30-1000, 30-900, 30-800, 30-700, 30-600, 30-500, 30-400, 30-300, 30-200, 30-100, 30-90, 30-80, 30-70, 30-60, 30-50, 30-40, 40-1000, 40-900, 40-800, 40-700, 40-600, 40-500, 40-400, 40-300, 40-200, 40-100, 40-90, 40-80, 40-70, 40-60, 40-50, 50-1000, 50-900, 50-800, 50-700, 50-600, 50-500, 50-400, 50-300, 50-200, 50-100, 50-90, 50-80, 50-70, 50-60, 60-1000, 60-900, 60-800, 60-700, 60-600, 60-500, 60-400, 60-300, 60-200, 60-100, 60-90, 60-80, 60-70, 70-1000, 70-900, 70-800, 70-700, 70-600, 70-500, 70-400, 70-300, 70-200, 70-100, 70-90, 70-80, 80-1000, 80-900, 80-800, 80-700, 80-600, 80-500, 80-400, 80-300, 80-200, 80-100, 80-90, 90-1000, 90-900, 90-800, 90-700, 90-600, 90-500, 90-400, 90-300, 90-200, 90-100, 100-1000, 100-900, 100-800, 100-700, 100-600, 100-500, 100-400, 100-300, 100-200, 200-1000, 200-900, 200-800, 200-700, 200-600, 200-500, 200-400, 200-300, 300-1000, 300-900, 300-800, 300-700, 300-600, 300-500, 300-400, 400-1000, 400-900, 400-800, 400-700, 400-600, 400-500, 500-1000, 500-900, 500-800, 500-700, 500-600, 600-1000, 600-900, 600-800, 600-700, 700-1000, 700-900, 700-800, 800-1000, 800-900, or 900-1000 fold. In some embodiments, the activity of a synthetic promoter in one cell type or a cellular state may be different from (higher or lower than) the activity of the synthetic promoter in another cell type or another cellular state by 10%, 20%, 30%, 40%, 50%, 60%, 70%, 80%, 90%, 100%, 2 fold, 2-fold, 3-fold, 4-fold, 5-fold, 6-fold, 7-fold, 8 -fold, 9-fold, 10-fold, 20-fold, 30-fold, 40-fold, 50-fold, 60-fold, 70-fold, 80-fold, 90-fold, 100-fold, 500-fold, or 1000-fold. In some embodiments, a synthetic promoter may be inactive in one cell type and active in another. In some embodiments, a synthetic promoter may be inactive in one cellular state and active in another. Methods of measuring the activities of a promoter (e.g., a synthetic promoter) are known to those skilled in the art, e.g., as described in Jeyaseelan et al., Nucleic Acids Research. 29 (12), 2001; Allard et al., Cell Notes (21), 2008; and Zaslaver et al., Nature Methods. 3 (8): 623-628, 2006, each of which is incorporated herein by reference.

[0036] In some embodiments, a synthetic promoter has differential activity (higher or lower) in one type of diseased cell relative to a healthy cell or another type of diseased cell. A “diseased cell” refers to an abnormal cell that is associated with a particular disease or condition. Non-limiting examples of diseased cells include: cancer cells, diseased neurons, diseased cardiomyocytes, diseased skin cells, diseased liver cells, diseased immune cells, diseased epithelial cells, diseased eye cells, diseased astrocytes, diseased microglia, and diseased stem cells. Other diseased cell types are encompassed herein. One skilled in the art is able to identify diseased cells. A “healthy” cell, also referred to as a “non-diseased cell,” refers to a normal cell that is not associated with any disease or condition.

[0037] In some embodiments, a synthetic promoter has differential activity (e.g., higher or lower) in one cellular state relative to another cellular state. Non-limiting examples of different cell types that may transition between different cellular states include: embryonic stem cells, adult stem cells, induced pluripotent stem cells, neurons, cardiomyocytes, skin cells, liver cells, immune cells, epithelial cells, eye cells, astrocytes, and microglia.

[0038] In some embodiments, a synthetic promoter as provided herein is active only in or has higher activity in cancer cells. For example, a synthetic promoter as provided herein may be activate only in in breast cancer cells and remains inactive in non-breast cancer cells, or has higher activity in breast cancer cells compared to in healthy cells or non-breast cancer cells. As another example, a synthetic promoter as provided herein may be activate only in tumor cancer cells and remains inactive in circulating cancer cells, or has higher activity in tumor cancer cells compared to circulating cancer cells.

[0039] In some embodiments, a synthetic promoter has higher activity in a breast cancer cell relative to a healthy cell or relative to other types of cancer cells.

[0040] In some embodiments, a synthetic promoter has higher activity in a ovarian cancer cell relative to a healthy cell or relative to other types of cancer cells.

[0041] In some embodiments, a synthetic promoter has higher activity in a colorectal cancer cell relative to a healthy cell or relative to other types of cancer cells.

[0042] In some embodiments, a synthetic promoter comprises at least one (one or more) sequence identified in Table 5 (a specific transcription factor binding site sequence). In some embodiments, a synthetic promoter comprises at least one (e.g., at least 2, at least 3, at least 4, or at least 5) tandem repeat of a sequence identified in Table 5. In some embodiments, a synthetic promoter comprises 1, 2, 3, 4, 5, 6, 7, 8, 9, or 10 tandem repeat(s) of a sequence identified in Table 5. A repeat sequence of Table 5 may be separated from each other by a linker sequence. In some embodiments, the linker sequences comprises or consists of three (random) nucleotides (e.g., AGA, TCG, GAC, CTA, ACT, TGC, GTA). In some embodiments, a synthetic promoter comprises the following consensus motif: TFBS-AGA-TFBS- TCG-TFBS-GAC-TFBS-CTA-TFBS-ACT-TFBS-TGC-TFBS-GTA-TFBS, wherein “TFBS” is a transcription factor binding site of Table 5.

[0043] In some embodiments, a synthetic promoter may comprise a tandem repeat of a USF1 transcription factor binding site CCACGTGC (SEQ ID NO: 12265). In some embodiments, a synthetic promoter comprises the following sequence:

(SEQ ID NO: 12266)
CCACGTGCAGACCACGTGCTCGCCACGTGCGACCCACGTGCCTACCACGT
GCACTCCACGTGCTGCCCACGTGCGTACCACGTGCG.

In some embodiments, a synthetic promoter may comprise a tandem repeat of a MAFK transcription factor binding site TGCTGAGTCAGCA (SEQ ID NO: 12267). In some embodiments, a synthetic promoter comprises the following sequence:

(SEQ ID NO: 12268)
TGCTGAGTCAGCAAGATGCTGAGTCAGCATCGTGCTGAGTCAGCAGACTG
CTGAGTCAGCACTATGCTGAGTCAGCAACTTGCTGAGTCAGCATGCTGCT
GAGTCAGCAGTATGCTGAGTCAGCAG.

### Engineered Nucleic Acids and Output Molecules

[0044] Further provided herein are engineered nucleic acids (e.g., construct) containing the synthetic promoters described herein. In some embodiments, a synthetic promoter is operably linked to a nucleotide sequence encoding a molecule (e.g., a protein or nucleic acid). A promoter is considered to be “operably linked” when it is in a correct functional location and orientation in relation to a nucleic acid sequence it regulates to control (“drive”) transcriptional initiation and/or expression of that sequence.

[0045] In some embodiments, a synthetic promoter is operably linked to a nucleotide sequence encoding an output molecule, such that activation of the synthetic promoter results in expression of the output molecule. The signal of the output molecule may be detected and its intensity is an indication of the level of activation of the synthetic promoter. As such, by comparing the signal from the output molecule, the activities of a synthetic promoter in different cell types can be compared. In some embodiments, a promoter that is operably linked to a nucleotide sequence encoding an output molecule may be used for diagnostic purposes. For example, when a synthetic promoter that has higher activity in a diseased cell (e.g., a cancer cell such as a breast cancer cell) is operably linked to a nucleotide sequence encoding an output molecule, the higher signal generated from the output molecule in a cell relative to another cell indicates that the cell is a diseased cell (e.g., a cancer cell such as a breast cancer cell). The example is not meant to be limiting. The synthetic promoter described herein may be used for the diagnosis of any disease, so long as it has differential activity in the diseased cell relative to a healthy cell or to other cell types.

[0046] In some embodiments, the output molecule is a detectable protein. In some embodiments, a detectable protein is a fluorescent protein. A fluorescent protein is a protein that emits a fluorescent light when exposed to a light source at an appropriate wavelength (e.g., light in the blue or ultraviolet range). Suitable fluorescent proteins that may be used as a detectable protein in the sensor circuit of the present disclosure include, without limitation, eGFP, eYFP, eCFP, mKate2, mCherry, mPlum, mGrape2, mRaspberry, mGrapel, mStrawberry, mTangerine, mBanana, and mHoneydew. In some embodiments, a detectable protein is an enzyme that hydrolyzes an substrate to produce a detectable signal (e.g., a chemiluminescent signal). Such enzymes include, without limitation, beta-galactosidase (encoded by LacZ), horseradish peroxidase, or luciferase. In some embodiments, the output signal is a fluorescent RNA. A fluorescent RNA is an RNA aptamer that emits a fluorescent light when bound to a fluorophore and exposed to a light source at an appropriate wavelength (e.g., light in the blue or ultraviolet range). Suitable fluorescent RNAs that may be used as an output signal in the sensor circuit of the present disclosure include, without limitation, Spinach and Broccoli (e.g., as described in Paige et al., Science Vol. 333, Issue 6042, pp. 642-646, 2011, incorporated herein by reference).

[0047] In some embodiments, a synthetic promoter is operably linked to a nucleotide sequence encoding a therapeutic molecule. A “therapeutic molecule” is a molecule that has therapeutic effects on a disease or condition, and may be used to treat a diseases or condition. Therapeutic molecules of the present disclosure may be nucleic acid-based or protein or polypeptide-based. In some embodiments, the synthetic promoter drives the expression of the therapeutic molecule in a desired cell type (e.g., cancer cell) but not in other cell types, due to the synthetic promoter's cell-specific activity. As such, targeted therapy of diseases (e.g., cancer) is achieved.

[0048] In some embodiments, nucleic acid-based therapeutic molecule may be an RNA interference (RNAi) molecule (e.g., a microRNA, siRNA, or shRNA) or an nucleic acid enzyme (e.g., a ribozyme). RNAi molecules and there use in silencing gene expression are familiar to those skilled in the art. In some embodiments, the RNAi molecule targets an oncogene.

[0049] An oncogene is a gene that in certain circumstances can transform a cell into a tumor cell. An oncogene may be a gene encoding a growth factor or mitogen (e.g., c-Sis), a receptor tyrosine kinase (e.g., EGFR, PDGFR, VEGFR, or HER2/neu), a cytoplasmic tyrosine kinase (e.g., Src family kinases, Syk-ZAP-70 family kinases, or BTK family kinases), a cytoplasmic serine/threonine kinase or their regulatory subunits (e.g., Raf kinase or cyclin-dependent kinase), a regulatory GTPase (e.g., Ras), or a transcription factor (e.g., Myc). In some embodiments, the oligonucleotide targets Lipocalin (Lcn2) (e.g., a Lcn2 siRNA). One skilled in the art is familiar with genes that may be targeted for the treatment of cancer.

[0050] Non-limiting examples of protein or polypeptide-based therapeutic molecules include enzymes, regulatory proteins (e.g., immuno-regulatory proteins), antigens, antibodies or antibody fragments, and structural proteins. In some embodiments, the protein or polypeptide-based therapeutic molecules are for cancer therapy.

[0051] Suitable enzymes (for operably linking to a synthetic promoter) for some embodiments of this disclosure include, for example, oxidoreductases, transferases, polymerases, hydrolases, lyases, synthases, isomerases, and ligases, digestive enzymes (e.g., proteases, lipases, carbohydrases, and nucleases). In some embodiments, the enzyme is selected from the group consisting of lactase, beta-galactosidase, a pancreatic enzyme, an oil-degrading enzyme, mucinase, cellulase, isomaltase, alginase, digestive lipases (e.g., lingual lipase, pancreatic lipase, phospholipase), amylases, cellulases, lysozyme, proteases (e.g., pepsin, trypsin, chymotrypsin, carboxypeptidase, elastase,), esterases (e.g. sterol esterase), disaccharidases (e.g., sucrase, lactase, beta-galactosidase, maltase, isomaltase), DNases, and RNases.

[0052] Non-limiting examples of antibodies and fragments thereof include: bevacizumab (AVASTIN®), trastuzumab (HERCEPTIN®), alemtuzumab (CAMPATH®, indicated for B cell chronic lymphocytic leukemia,), gemtuzumab (MYLOTARG®, hP67.6, anti-CD33, indicated for leukemia such as acute myeloid leukemia), rituximab (RITUXAN®), tositumomab (BEXXAR®, anti-CD20, indicated for B cell malignancy), MDX-210 (bispecific antibody that binds simultaneously to HER-2/neu oncogene protein product and type I Fc receptors for immunoglobulin G (IgG) (Fc gamma RI)), oregovomab (OVAREX®, indicated for ovarian cancer), edrecolomab (PANOREX®), daclizumab (ZENAPAX®), palivizumab (SYNAGIS®, indicated for respiratory conditions such as RSV infection), ibritumomab tiuxetan (ZEVALIN®, indicated for Non-Hodgkin's lymphoma), cetuximab (ERBITUX®), MDX-447, MDX-22, MDX-220 (anti-TAG-72), IOR-C5, IOR-T6 (anti-CD1), IOR EGF/R3, celogovab (ONCOSCINT® OV103), epratuzumab (LYMPHOCIDE®), pemtumomab (THERAGYN®), Gliomab-H (indicated for brain cancer, melanoma) . In some embodiments, the antibody is an antibody that inhibits an immune check point protein, e.g., an anti-PD-1 antibody such as pembrolizumab (Keytruda®) or nivolumab (Opdivo®), or an anti-CTLA-4 antibody such as ipilimumab (Yervoy®). Other antibodies and antibody fragments may be operably linked to a synthetic promoter, as provided herein.

[0053] A regulatory protein may be, in some embodiments, a transcription factor or a immunoregulatory protein. Non-limiting, exemplary transcriptional factors include: those of the NFkB family, such as Rel-A, c-Rel, Rel-B, p50 and p52; those of the AP-1 family, such as Fos, FosB, Fra-1, Fra-2, Jun, JunB and JunD; ATF; CREB; STAT-1, -2, -3, -4, -5 and -6; NFAT-1, -2 and -4; MAF; Thyroid Factor; IRF; Oct-1 and -2; NF-Y; Egr-1; and USF-43, EGR1, Sp1, and E2F1. Other transcription factors may be operably linked to a synthetic promoter, as provided herein.

[0054] As used herein, an immunoregulatory protein is a protein that regulates an immune response. Non-limiting examples of immunoregulatory include: antigens, adjuvants (e.g., flagellin, muramyl dipeptide), cytokines including interleukins (e.g., IL-2, IL-7, IL-15 or superagonist/mutant forms of these cytokines), IL-12, IFN-gamma, IFN-alpha, GM-CSF, FLT3-ligand), and immunostimulatory antibodies (e.g., anti-CTLA-4, anti-CD28, anti-CD3, or single chain/antibody fragments of these molecules). Other immunoregulatory proteins may be operably linked to a synthetic promoter, as provided herein.

[0055] As used herein, an antigen is a molecule or part of a molecule that is bound by the antigen-binding site of an antibody. In some embodiments, an antigen is a molecule or moiety that, when administered to or expression in the cells of a subject, activates or increases the production of antibodies that specifically bind the antigen. Antigens of pathogens are well known to those of skill in the art and include, but are not limited to parts (coats, capsules, cell walls, flagella, fimbriae, and toxins) of bacteria, viruses, and other microorganisms. Examples of antigens that may be used in accordance with the disclosure include, without limitation, cancer antigens, self-antigens, microbial antigens, allergens and environmental antigens. Other antigens may be operably linked to a synthetic promoter, as provided herein.

[0056] In some embodiments, the antigen of the present disclosure is a cancer antigen. A cancer antigen is an antigen that is expressed preferentially by cancer cells (i.e., it is expressed at higher levels in cancer cells than on non-cancer cells) and, in some instances, it is expressed solely by cancer cells. Cancer antigens may be expressed within a cancer cell or on the surface of the cancer cell. Cancer antigens that may be used in accordance with the disclosure include, without limitation, MART-1/Melan-A, gp100, adenosine deaminase-binding protein (ADAbp), FAP, cyclophilin b, colorectal associated antigen (CRC)-0017-1A/GA733, carcinoembryonic antigen (CEA), CAP-1, CAP-2, etv6, AML1, prostate specific antigen (PSA), PSA-1, PSA-2, PSA-3, prostate-specific membrane antigen (PSMA), T cell receptor/CD3-zeta chain and CD20. The cancer antigen may be selected from the group consisting of MAGE-A1, MAGE-A2, MAGE-A3, MAGE-A4, MAGE-A5, MAGE-A6, MAGE-A7, MAGE-A8, MAGE-A9, MAGE-A10, MAGE-A11, MAGE-A12, MAGE-Xp2 (MAGE-B2), MAGE-Xp3 (MAGE-B3), MAGE-Xp4 (MAGE-B4), MAGE-C1, MAGE-C2, MAGE-C3, MAGE-C4 and MAGE-05. The cancer antigen may be selected from the group consisting of GAGE-1, GAGE-2, GAGE-3, GAGE-4, GAGE-5, GAGE-6, GAGE-7, GAGE-8 and GAGE-9. The cancer antigen may be selected from the group consisting of BAGE, RAGE, LAGE-1, NAG, GnT-V, MUM-1, CDK4, tyrosinase, p53, MUC family, HER2/neu, p21ras, RCAS1, a-fetoprotein, E-cadherin, α-catenin, β-catenin, γ-catenin, p120ctn, gp100Pme1117, PRAIVIE, NY-ESO-1, cdc27, adenomatous polyposis coli protein (APC), fodrin, Connexin 37, Ig-idiotype, p15, gp75, GM2 ganglioside, GD2 ganglioside, human papilloma virus proteins, Smad family of tumor antigens, lmp-1, PIA, EBV-encoded nuclear antigen (EBNA)-1, brain glycogen phosphorylase, SSX-1, SSX-2 (HOM-MEL-40), SSX-1, SSX-4, SSX-5, SCP-1 and CT-7, CD20 and c-erbB-2. Other cancer antigens may be operably linked to a synthetic promoter, as provided herein.

[0057] In some embodiments, a protein or polypeptide-based therapeutic molecule is a fusion protein. A fusion protein is a protein comprising two heterologous proteins, protein domains, or protein fragments, that are covalently bound to each other, either directly or indirectly (e.g., via a linker), via a peptide bond. In some embodiments, a fusion protein is encoded by a nucleic acid comprising the coding region of a protein in frame with a coding region of an additional protein, without intervening stop codon, thus resulting in the translation of a single protein in which the proteins are fused together.

[0058] A “nucleic acid” is at least two nucleotides covalently linked together, and in some instances, may contain phosphodiester bonds (e.g., a phosphodiester “backbone”). An “engineered nucleic acid” (also referred to as a “construct”) is a nucleic acid that does not occur in nature. It should be understood, however, that while an engineered nucleic acid as a whole is not naturally-occurring, it may include nucleotide sequences that occur in nature. In some embodiments, an engineered nucleic acid comprises nucleotide sequences from different organisms (e.g., from different species). For example, in some embodiments, an engineered nucleic acid includes a murine nucleotide sequence, a bacterial nucleotide sequence, a human nucleotide sequence, and/or a viral nucleotide sequence. Engineered nucleic acids include recombinant nucleic acids and synthetic nucleic acids. A “recombinant nucleic acid” is a molecule that is constructed by joining nucleic acids (e.g. ,isolated nucleic acids, synthetic nucleic acids or a combination thereof) and, in some embodiments, can replicate in a living cell. A “synthetic nucleic acid” is a molecule that is amplified or chemically, or by other means, synthesized. A synthetic nucleic acid includes those that are chemically modified, or otherwise modified, but can base pair with naturally-occurring nucleic acid molecules. Recombinant and synthetic nucleic acids also include those molecules that result from the replication of either of the foregoing.

[0059] In some embodiments, a nucleic acid of the present disclosure is considered to be a nucleic acid analog, which may contain, at least in part, other backbones comprising, for example, phosphoramide, phosphorothioate, phosphorodithioate, O-methylphophoroamidite linkages and/or peptide nucleic acids. A nucleic acid may be single-stranded (ss) or double-stranded (ds), as specified, or may contain portions of both single-stranded and double-stranded sequence. In some embodiments, a nucleic acid may contain portions of triple-stranded sequence. A nucleic acid may be DNA, both genomic and/or cDNA, RNA or a hybrid, where the nucleic acid contains any combination of deoxyribonucleotides and ribonucleotides (e.g., artificial or natural), and any combination of bases, including uracil, adenine, thymine, cytosine, guanine, inosine, xanthine, hypoxanthine, isocytosine and isoguanine.

[0060] Nucleic acids of the present disclosure may include one or more genetic elements. A “genetic element” refers to a particular nucleotide sequence that has a role in nucleic acid expression (e.g., promoter, enhancer, terminator) or encodes a discrete product of an engineered nucleic acid (e.g., a nucleotide sequence encoding a guide RNA, a protein and/or an RNA interference molecule, such as siRNA or miRNA).

[0061] Nucleic acids of the present disclosure may be produced using standard molecular biology methods (see, e.g., Green and Sambrook, Molecular Cloning, A Laboratory Manual, 2012, Cold Spring Harbor Press).

[0062] In some embodiments, nucleic acids are produced using GIBSON ASSEMBLY® Cloning (see, e.g., Gibson, D.G. et al. Nature Methods, 343-345, 2009; and Gibson, D.G. et al. Nature Methods, 901-903, 2010, each of which is incorporated by reference herein). GIBSON ASSEMBLY® typically uses three enzymatic activities in a single-tube reaction: 5′ exonuclease, the 3′ extension activity of a DNA polymerase and DNA ligase activity. The 5′ exonuclease activity chews back the 5′ end sequences and exposes the complementary sequence for annealing. The polymerase activity then fills in the gaps on the annealed regions. A DNA ligase then seals the nick and covalently links the DNA fragments together. The overlapping sequence of adjoining fragments is much longer than those used in Golden Gate Assembly, and therefore results in a higher percentage of correct assemblies.

[0063] In some embodiments, an engineered nucleic acid is delivered to a cell on a vector. A “vector” refers to a nucleic acid (e.g., DNA) used as a vehicle to artificially carry genetic material (e.g., an engineered nucleic acid) into a cell where, for example, it can be replicated and/or expressed. In some embodiments, a vector is an episomal vector (see, e.g., Van Craenenbroeck K. et al. Eur. J. Biochem. 267, 5665, 2000, incorporated by reference herein). A non-limiting example of a vector is a plasmid (e.g., FIG. 3). Plasmids are double-stranded generally circular DNA sequences that are capable of automatically replicating in a host cell.

[0064] Plasmid vectors typically contain an origin of replication that allows for semi-independent replication of the plasmid in the host and also the transgene insert. Plasmids may have more features, including, for example, a “multiple cloning site,” which includes nucleotide overhangs for insertion of a nucleic acid insert, and multiple restriction enzyme consensus sites to either side of the insert. Another non-limiting example of a vector is a viral vector, such as an oncolytic herpes simplex virus. Thus, the present disclosure provides oncolytic herpes simplex virus vectors comprising an engineered nucleic acid comprising a promoter that comprises the nucleotide sequence identified by any one of SEQ ID NOS: 1-12263, or a nucleotide sequences at least 95% identical to the nucleotide sequence identified by any one of SEQ ID NOS: 1-12263.

### Cells

[0065] Cells comprising the engineered nucleic acids of the present disclosure are also provided. Engineered nucleic acids comprising the synthetic promoters described herein are, in some embodiments, delivered systemically or to a particular cell type, such as a cancerous cell, a benign tumor cell or other disease cell. In some embodiments, engineered nucleic acids are delivered to a subject having tumor cells or cancer cells, and the synthetic promoters drive the expression of the nucleotide sequence to which it is operably linked to specifically in the tumor cells or cancer cells.

[0066] A cancerous cell may be any type of cancerous cell, including, but not limited to, premalignant neoplasms, malignant tumors, metastases, or any disease or disorder characterized by uncontrolled cell growth such that it would be considered cancerous or precancerous. The cancer may be a primary or metastatic cancer. Cancers include, but are not limited to, ocular cancer, biliary tract cancer, bladder cancer, pleura cancer, stomach cancer, ovary cancer, meninges cancer, kidney cancer, brain cancer including glioblastomas and medulloblastomas, breast cancer, cervical cancer, choriocarcinoma, colon cancer, endometrial cancer, esophageal cancer, gastric cancer, hematological neoplasms including acute lymphocytic and myelogenous leukemia, multiple myeloma, AIDS-associated leukemias and adult T-cell leukemia lymphoma, intraepithelial neoplasms including Bowen's disease and Paget's disease, liver cancer, lung cancer, lymphomas including Hodgkin's disease and lymphocytic lymphomas, neuroblastomas, oral cancer including squamous cell carcinoma, ovarian cancer including those arising from epithelial cells, stromal cells, germ cells and mesenchymal cells, pancreatic cancer, prostate cancer, rectal cancer, sarcomas including leiomyosarcoma, rhabdomyosarcoma, liposarcoma, fibrosarcoma, and osteosarcoma, skin cancer including melanoma, Kaposi's sarcoma, basocellular cancer, and squamous cell cancer, testicular cancer including germinal tumors such as seminoma, non-seminoma, teratomas, choriocarcinomas, stromal tumors and germ cell tumors, thyroid cancer including thyroid adenocarcinoma and medullar carcinoma, and renal cancer including adenocarcinoma and Wilms' tumor. Commonly encountered cancers include breast, prostate, lung, ovarian, colorectal, and brain cancer. In some embodiments, the tumor is a melanoma, carcinoma, sarcoma, or lymphoma.

[0067] Engineered nucleic acids of the present disclosure may be used in a broad range of host cell types. In some embodiments, engineered nucleic acids are used in mammalian cells (e.g., human cells), bacterial cells (Escherichia coli cells), yeast cells, insect cells, or other types of cells. Engineered nucleic acids of the present disclosure may be used in vivo, e.g., in a subject such as a human subject.

[0068] In some embodiments, engineered nucleic acids comprising synthetic promoters are used in mammalian cells, for example, for research or therapeutic applications. For example, in some embodiments, engineered nucleic acids are used in human cells, primate cells (e.g., vero cells), rat cells (e.g., GH3 cells, 0C23 cells) or mouse cells (e.g., MC3T3 cells). There are a variety of human cell lines, including, without limitation, human embryonic kidney (HEK) cells, HeLa cells, cancer cells from the National Cancer Institute's 60 cancer cell lines (NCI60), DU145 (prostate cancer) cells, Lncap (prostate cancer) cells, MCF-7 (breast cancer) cells, MDA-MB-438 (breast cancer) cells, PC3 (prostate cancer) cells, T47D (breast cancer) cells, THP-1 (acute myeloid leukemia) cells, U87 (glioblastoma) cells, SHSYSY human neuroblastoma cells (cloned from a myeloma) and Saos-2 (bone cancer) cells. In some embodiments, engineered nucleic acids are expressed in human embryonic kidney (HEK) cells (e.g., HEK 293 or HEK 293T cells). In some embodiments, engineered nucleic acids are expressed in stem cells (e.g., human stem cells) such as, for example, pluripotent stem cells (e.g., human pluripotent stem cells including human induced pluripotent stem cells (hiPSCs)). A “stem cell” refers to a cell with the ability to divide for indefinite periods in culture and to give rise to specialized cells. A “pluripotent stem cell” refers to a type of stem cell that is capable of differentiating into all tissues of an organism, but not alone capable of sustaining full organismal development. A “human induced pluripotent stem cell” refers to a somatic (e.g., mature or adult) cell that has been reprogrammed to an embryonic stem cell-like state by being forced to express genes and factors important for maintaining the defining properties of embryonic stem cells (see, e.g., Takahashi and Yamanaka, Cell 126 (4): 663-76, 2006, incorporated by reference herein). Human induced pluripotent stem cell cells express stem cell markers and are capable of generating cells characteristic of all three germ layers (ectoderm, endoderm, mesoderm).

[0069] Additional non-limiting examples of cell lines that may be used in accordance with the present disclosure include 293-T, 293-T, 3T3, 4T1, 721, 9L, A-549, A172, A20, A253, A2780, A2780ADR, A2780cis, A431, ALC, B16, B35, BCP-1, BEAS-2B, bEnd.3, BHK-21, BR 293, BxPC3, C2C12, C3H-10T1/2, C6, C6/36, Cal-27, CGR8, CHO, CML Ti, CMT, COR-L23, COR-L23/5010, COR-L23/CPR, COR-L23/R23, COS-7, COV-434, CT26, D17, DH82, DU145, DuCaP, E14Tg2a, EL4, EM2, EM3, EMT6/AR1, EMT6/AR10.0, FM3, H1299, H69, HB54, HB55, HCA2, Hepalcl c7, High Five cells, HL-60, HMEC, HT-29, HUVEC, J558L cells, Jurkat, JY cells, K562 cells, KCL22, KG1, Ku812, KYO1, LNCap, Ma-Mel 1, 2, 3 . . . 48, MC-38, MCF-10A, MCF-7, MDA-MB-231, MDA-MB-435, MDA-MB-468, MDCK II, MG63, MONO-MAC 6, MOR/0.2R, MRCS, MTD-1A, MyEnd, NALM-1, NCI-H69/CPR, NCI-H69/LX10, NCI-H69/LX20, NCI-H69/LX4, NIH-3T3, NW-145, OPCN/OPCT Peer, PNT-1A/PNT 2, PTK2, Raji, RBL cells, RenCa, RIN-5F, RMA/RMAS, S2, Saos-2 cells, Sf21, Sf9, SiHa, SKBR3, SKOV-3, T-47D, T2, T84, THP1, U373, U87, U937, VCaP, WM39, WT-49, X63, YAC-1 and YAR cells.

[0070] Cells of the present disclosure, in some embodiments, are modified. A modified cell is a cell that contains an exogenous nucleic acid or a nucleic acid that does not occur in nature. In some embodiments, a modified cell contains a mutation in a genomic nucleic acid. In some embodiments, a modified cell contains an exogenous independently replicating nucleic acid (e.g., an engineered nucleic acid present on an episomal vector). In some embodiments, a modified cell is produced by introducing a foreign or exogenous nucleic acid into a cell. A nucleic acid may be introduced into a cell by conventional methods, such as, for example, electroporation (see, e.g., Heiser W. C. Transcription Factor Protocols: Methods in Molecular Biology™ 2000; 130: 117-134), chemical (e.g., calcium phosphate or lipid) transfection (see, e.g., Lewis W. H., et al., Somatic Cell Genet. 1980 May; 6(3): 333-47; Chen C., et al., Mol Cell Biol. 1987 August; 7(8): 2745-2752), fusion with bacterial protoplasts containing recombinant plasmids (see, e.g., Schaffner W. Proc Natl Acad Sci USA. 1980 April; 77(4): 2163-7), transduction, conjugation, or microinjection of purified DNA directly into the nucleus of the cell (see, e.g., Capecchi M. R. Cell. 1980 November; 22(2 Pt 2): 479-88).

[0071] In some embodiments, a cell is modified to express a reporter molecule. In some embodiments, a cell is modified to express an inducible promoter operably linked to a reporter molecule (e.g., a fluorescent protein such as green fluorescent protein (GFP) or other reporter molecule).

[0072] In some embodiments, a cell is modified to overexpress an endogenous protein of interest (e.g., via introducing or modifying a promoter or other regulatory element near the endogenous gene that encodes the protein of interest to increase its expression level). In some embodiments, a cell is modified by mutagenesis. In some embodiments, a cell is modified by introducing an engineered nucleic acid into the cell in order to produce a genetic change of interest (e.g., via insertion or homologous recombination).

[0073] In some embodiments, an engineered nucleic acid may be codon-optimized, for example, for expression in mammalian cells (e.g., human cells) or other types of cells. Codon optimization is a technique to maximize the protein expression in living organism by increasing the translational efficiency of gene of interest by transforming a DNA sequence of nucleotides of one species into a DNA sequence of nucleotides of another species. Methods of codon optimization are well-known.

[0074] Also provided herein, in some aspects, are methods that comprise introducing into a cell an (e.g., at least one, at least two, at least three, or more) engineered nucleic acids or an episomal vector (e.g., comprising an engineered nucleic acid). An engineered nucleic acid may be introduced into a cell by conventional methods, such as, for example, electroporation, chemical (e.g., calcium phosphate or lipid) transfection, fusion with bacterial protoplasts containing recombinant plasmids, transduction, conjugation, or microinjection of purified DNA directly into the nucleus of the cell.

[0075] Engineered nucleic acids of the present disclosure may be delivered to a subject (e.g., a mammalian subject, such as a human subject) by any in vivo delivery method known in the art. For example, engineered nucleic acids may be delivered intravenously. In some embodiments, engineered nucleic acids are delivered in a delivery vehicle (e.g., non-liposomal nanoparticle or liposome). In some embodiments, engineered nucleic acids are delivered systemically to a subject having a cancer or other disease and activated (transcription is activated) specifically in cancer cells or diseased cells of the subject.

[0076] Engineered nucleic acids, as discussed above, may be delivered to cells (e.g., cancer cells) of a subject using a viral delivery system (e.g., retroviral, adenoviral, adeno-association, helper-dependent adenoviral systems, hybrid adenoviral systems, herpes simplex, pox virus, lentivirus, Epstein-Barr virus) or a non-viral delivery system (e.g., physical: naked DNA, DNA bombardment, electroporation, hydrodynamic, ultrasound or magnetofection; or chemical: cationic lipids, different cationic polymers or lipid polymer) (Nayerossadat N et al. Adv Biomed Res. 2012; 1: 27, incorporated herein by reference). In some embodiments, the non-viral based deliver system is a hydrogel-based delivery system (see, e.g., Brandl F, et al. Journal of Controlled Release, 2010, 142(2): 221-228, incorporated herein by reference).

### Additional Embodiments

[0077] The present disclosure further provides the additional embodiments set forth in the following numbered paragraphs:
[0078] 1. An engineered nucleic acid comprising a promoter that comprises the nucleotide sequence identified by any one of SEQ ID NOS: 1-12263, or a nucleotide sequences at least 95% identical to the nucleotide sequence identified by any one of SEQ ID NOS: 1-12263.
[0079] 2. The engineered nucleic acid of paragraph 1, wherein the activity of the promoter is increased in diseased cells relative to healthy cells.
[0080] 3. The engineered nucleic acid of paragraph 1, wherein the activity of the promoter is decreased in diseased cells relative to healthy cells.
[0081] 4. The engineered nucleic acid of paragraph 2 or 3, wherein the diseased cells are selected from breast cancer cells, colon cancer cells, and ovarian cancer cells.
[0082] 5. The engineered nucleic acid of any one of paragraphs 1-4, wherein the promoter is operably linked to a nucleotide sequence encoding a therapeutic protein.
[0083] 6. A cell comprising the engineered nucleic acid of any one of paragraphs 1-5.
[0084] 7. A method of delivering to a cell the engineered nucleic acid of any one of paragraphs 1-5.
[0085] 8. A method of delivering to a subject the engineered nucleic acid of any one of paragraphs 1-5.
[0086] 9. A method of delivering to a subject the cell of paragraph 6.
[0087] 10. The engineered nucleic acid of any one of paragraphs 1-5, wherein the nucleotide sequence is identified by any one of SEQ ID NO: 1-40 or a nucleotide sequences at least 95% identical to the nucleotide sequence identified by any one of SEQ ID NO: 1-40.
[0088] 11. The engineered nucleic acid of paragraph 10, wherein the nucleotide sequence is identified by SEQ ID NO: 1.
[0089] 12. The engineered nucleic acid of paragraph 10, wherein the nucleotide sequence is identified by SEQ ID NO: 2.
[0090] 13. The engineered nucleic acid of paragraph 10, wherein the nucleotide sequence is identified by SEQ ID NO: 3.
[0091] 14. The engineered nucleic acid of paragraph 10, wherein the nucleotide sequence is identified by SEQ ID NO: 4.
[0092] 15. The engineered nucleic acid of paragraph 10, wherein the nucleotide sequence is identified by SEQ ID NO: 5.
[0093] 16. The engineered nucleic acid of paragraph 10, wherein the nucleotide sequence is identified by SEQ ID NO: 6.
[0094] 17. The engineered nucleic acid of paragraph 10, wherein the nucleotide sequence is identified by SEQ ID NO: 7.
[0095] 18. The engineered nucleic acid of paragraph 10, wherein the nucleotide sequence is identified by SEQ ID NO: 8.
[0096] 19. The engineered nucleic acid of paragraph 10, wherein the nucleotide sequence is identified by SEQ ID NO: 9.
[0097] 20. The engineered nucleic acid of paragraph 10, wherein the nucleotide sequence is identified by SEQ ID NO: 10.
[0098] 21. The engineered nucleic acid of paragraph 10, wherein the nucleotide sequence is identified by SEQ ID NO: 11.
[0099] 22. The engineered nucleic acid of paragraph 10, wherein the nucleotide sequence is identified by SEQ ID NO: 12.
[0100] 23. The engineered nucleic acid of paragraph 10, wherein the nucleotide sequence is identified by SEQ ID NO: 13.
[0101] 24. The engineered nucleic acid of paragraph 10, wherein the nucleotide sequence is identified by SEQ ID NO: 14.
[0102] 25. The engineered nucleic acid of paragraph 10, wherein the nucleotide sequence is identified by SEQ ID NO: 15.
[0103] 26. The engineered nucleic acid of paragraph 10, wherein the nucleotide sequence is identified by SEQ ID NO: 16.
[0104] 27. The engineered nucleic acid of paragraph 10, wherein the nucleotide sequence is identified by SEQ ID NO: 17.
[0105] 28. The engineered nucleic acid of paragraph 10, wherein the nucleotide sequence is identified by SEQ ID NO: 18.
[0106] 29. The engineered nucleic acid of paragraph 10, wherein the nucleotide sequence is identified by SEQ ID NO: 19.
[0107] 30. The engineered nucleic acid of paragraph 10, wherein the nucleotide sequence is identified by SEQ ID NO: 20.
[0108] 31. The engineered nucleic acid of paragraph 10, wherein the nucleotide sequence is identified by SEQ ID NO: 21.
[0109] 32. The engineered nucleic acid of paragraph 10, wherein the nucleotide sequence is identified by SEQ ID NO: 22.
[0110] 33. The engineered nucleic acid of paragraph 10, wherein the nucleotide sequence is identified by SEQ ID NO: 23.
[0111] 34. The engineered nucleic acid of paragraph 10, wherein the nucleotide sequence is identified by SEQ ID NO: 24.
[0112] 35. The engineered nucleic acid of paragraph 10, wherein the nucleotide sequence is identified by SEQ ID NO: 25.
[0113] 36. The engineered nucleic acid of paragraph 10, wherein the nucleotide sequence is identified by SEQ ID NO: 26.
[0114] 37. The engineered nucleic acid of paragraph 10, wherein the nucleotide sequence is identified by SEQ ID NO: 27.
[0115] 38. The engineered nucleic acid of paragraph 10, wherein the nucleotide sequence is identified by SEQ ID NO: 28.
[0116] 39. The engineered nucleic acid of paragraph 10, wherein the nucleotide sequence is identified by SEQ ID NO: 29.
[0117] 40. The engineered nucleic acid of paragraph 10, wherein the nucleotide sequence is identified by SEQ ID NO: 30.
[0118] 41. The engineered nucleic acid of paragraph 10, wherein the nucleotide sequence is identified by SEQ ID NO: 31.
[0119] 42. The engineered nucleic acid of paragraph 10, wherein the nucleotide sequence is identified by SEQ ID NO: 32.
[0120] 43. The engineered nucleic acid of paragraph 10, wherein the nucleotide sequence is identified by SEQ ID NO: 33.
[0121] 44. The engineered nucleic acid of paragraph 10, wherein the nucleotide sequence is identified by SEQ ID NO: 34.
[0122] 45. The engineered nucleic acid of paragraph 10, wherein the nucleotide sequence is identified by SEQ ID NO: 35.
[0123] 46. The engineered nucleic acid of paragraph 10, wherein the nucleotide sequence is identified by SEQ ID NO: 36.
[0124] 47. The engineered nucleic acid of paragraph 10, wherein the nucleotide sequence is identified by SEQ ID NO: 37.
[0125] 48. The engineered nucleic acid of paragraph 10, wherein the nucleotide sequence is identified by SEQ ID NO: 38.
[0126] 49. The engineered nucleic acid of paragraph 10, wherein the nucleotide sequence is identified by SEQ ID NO: 39.
[0127] 50. The engineered nucleic acid of paragraph 10, wherein the nucleotide sequence is identified by SEQ ID NO: 40.
[0128] 51. The engineered nucleic acid of any one of paragraphs 1-5, wherein the nucleotide sequence is identified by any one of SEQ ID NO: 41-49, or a nucleotide sequences at least 95% identical to the nucleotide sequence identified by any one of SEQ ID NO: 41-49.
[0129] 52. The engineered nucleic acid of paragraph 51, wherein the nucleotide sequence is identified by SEQ ID NO: 41.
[0130] 53. The engineered nucleic acid of paragraph 51, wherein the nucleotide sequence is identified by SEQ ID NO: 42.
[0131] 54. The engineered nucleic acid of paragraph 51, wherein the nucleotide sequence is identified by SEQ ID NO: 43.
[0132] 55. The engineered nucleic acid of paragraph 51, wherein the nucleotide sequence is identified by SEQ ID NO: 44.
[0133] 56. The engineered nucleic acid of paragraph 51, wherein the nucleotide sequence is identified by SEQ ID NO: 45.
[0134] 57. The engineered nucleic acid of paragraph 51, wherein the nucleotide sequence is identified by SEQ ID NO: 46.
[0135] 58. The engineered nucleic acid of paragraph 51, wherein the nucleotide sequence is identified by SEQ ID NO: 47.
[0136] 59. The engineered nucleic acid of paragraph 51, wherein the nucleotide sequence is identified by SEQ ID NO: 48.
[0137] 60. The engineered nucleic acid of paragraph 51, wherein the nucleotide sequence is identified by SEQ ID NO: 49.
[0138] 61. An oncolytic virus comprising the engineered nucleic acid of any one of paragraphs 1-5 or 10-60.
[0139] 62. The oncolytic virus of paragraph 61, wherein the oncolytic virus is an oncolytic herpes simplex virus.

### EXAMPLES

### Example 1

### Synthetic Promoter Activity and Specificity—Synthetic Promoters 1-40

[0140] Reporter constructs were constructed by placing the coding sequence of ECFP or mKate2 under the synthetic promoters. The reporter constructs were transfected into different cell lines as listed in Table 1. The expression of ECFP or mKate2 indicates the activity of the synthetic promoter in each cell line. The activities of a set of synthetic promoters (Table 2) were tested in different cell lines. The results are provided in FIGS. 1-7.

TABLE 1
Different Cell Lines for Testing Promoter Activity

| # | Line | Type | Tissue | Organism |
|---|---|---|---|---|
| 1 | OVCAR8 | cancer | ovarian | human |
| 2 | IOSE386 | normal | ovarian | human |
| 3 | IOSE385 | normal | ovarian | human |
| 4 | IOSE120 | normal | ovarian | human |
| 5 | HCT116 | cancer | Colorectal | human |
| 6 | CCD-841-Con | normal | Colon | human |
| 7 | SKBR3 | cancer | breast | human |
| 8 | MDA-MB-453 | cancer | breast | human |
| 9 | MDA-MB-231 | cancer | breast | human |
| 10 | MCF-7 | cancer | breast | human |
| 11 | MCF-10A | normal | breast | human |
| 12 | MCF-12A | normal | breast | human |
| 13 | aHDF | normal | adult dermal fibroblasts | human |
| 14 | NB508 | cancer | pancreatic | mouse |
| 15 | 4T1 | cancer | breast | mouse |

Examples of synthetic promoters used to regulate expression of ECFP:

TABLE 2
Synthetic Promoters 1-40

| | | SEQ ID |
|---|---|---|
| Name | Sequence | NO |
| Synthetic | CAGGGGATGCTTTAGGCGGGAAAGTCAGAGTTTCTGCCTCCAT | 1 |
| Promoter | TTCCCAGGGGATGCTTTAGGCGGGAAAGTCAGAGTTTCTGCCT | |
| 1 | CCATTTGTCATGCATCTCAATTACCCAGGGGATGCTTTAGGCG | |
| | GGAAAGTCAGAGTTTCTGCCTCCATTTCCCAGGGGATGCTTTA | |
| | GGCGGGAAAGTCAGAGTTTCTGCCTCCATTT | |
| Synthetic | CCCGTTTCCAGCCGAAACGTAGCCGTTTCGTACTCGAGCTTTG | 2 |
| Promoter | GCGCATCCGTTTCCCGAATTCCCGAAACGTTCCTTTGGCGCTG | |
| 2 | CCCTACTGACACTGCCTGCGTTTCCAGCCGAAACGTAGCCGTT | |
| | TCGTACTCGAGCTTTGGCGCATCCGTTTCCCGAATTCCCGAAA | |
| | CGTTCCTTTGGCGC | |
| Synthetic | CCCGTTTCCAGCCGAAACGTAGCCGTTTCGTACTCGAGCTTTG | 3 |
| Promoter | GCGCATCCGTTTCCCGAATTCCCGAAACGTTCCTTTGGCGCTG | |
| 3 | CCCTACTGACACTGCCTGCGTTTCCAGCCGAAACGTAGCCGTT | |
| | TCGTACTCGAGCTTTGGCGCATCCGTTTCCCGAATTCCCGAAA | |
| | CGTTCCTTTGGCGCGGCGCGCCAGACGCTAGCGGGGGGCTATA | |
| | AAAGGGGGTGGGGGCGTTCGTCCTCACTCTAGATCTGCGATCT | |
| | AAGTAAGCTTGATATCGCGGCCGCCCCTGGACACCCTTGGAAG | |
| | CAAATCCCCTGCAGGCCCGTTTCCAGCCGAAACGTAGCCGTTT | |
| | CGTACTCGAGCTTTGGCGCATCCGTTTCCCGAATTCCCGAAAC | |
| | GTTCCTTTGGCGCTGCCCTACTGACACTGCCTGCGTTTCCAGCC | |
| | GAAACGTAGCCGTTTCGTACTCGAGCTTTGGCGCATCCGTTTC | |
| | CCGAATTCCCGAAACGTTCCTTTGGCGC | |
| Synthetic | CCGGTGACTCAGTAGCGGTGACTCAGAATCGATGACTCAGAC | 4 |
| Promoter | AGTGACTAAGTACTATGAGTCAGGTCGAATGAGTCAGCGAGT | |
| 4 | GACTCAATGGTCCATGACTCACGAATTCCTGCCCTACTGACAC | |
| | TGCCTGCCGGTGACTCAGTAGCGGTGACTCAGAATCGATGACT | |
| | CAGACAGTGACTAAGTACTATGAGTCAGGTCGAATGAGTCAG | |
| | CGAGTGACTCAATGGTCCATGACTCAGAATATCCGC | |
| Synthetic | CCGGTGACTCAGTAGCGGTGACTCAGAATCGATGACTCAGAC | 5 |
| Promoter | AGTGACTAAGTACTATGAGTCAGGTCGAATGAGTCAGCGAGT | |
| 5 | GACTCAATGGTCCATGACTCACGAATTCCTGCCCTACTGACAC | |
| | TGCCTGCCGGTGACTCAGTAGCGGTGACTCAGAATCGATGACT | |
| | CAGACAGTGACTAAGTACTATGAGTCAGGTCGAATGAGTCAG | |
| | CGAGTGACTCAATGGTCCATGACTCAGAATATCCGCGGCTTGG | |
| | AAGCAAATCCCCTGCAGGCCGGTGACTCAGTAGCGGTGACTC | |
| | AGAATCGATGACTCAGACAGTGACTAAGTACTATGAGTCAGG | |
| | TCGAATGAGTCAGCGAGTGACTCAATGGTCCATGACTCACGAA | |
| | TTCCTGCCCTACTGACACTGCCTGCCGGTGACTCAGTAGCGGT | |
| | GACTCAGAATCGATGACTCAGACAGTGACTAAGTACTATGAGT | |
| | CAGGTCGAATGAGTCAGCGAGTGACTCAATGGTCCATGACTCA | |
| | GAATATCCGC | |
| Synthetic | TCCACACGTGCAAGCCGAGCACGTGGCTCATCACCACGAGTCA | 6 |
| Promoter | GACAACCACGTGCTCACTGACCACGTGCCTGTCGGCCACGTGT | |
| 6 | GAGTCCACACGTGCATCCCGAGCACGTGGCTCCGAATTCCTGC | |
| | CCTACTGACACTGCCTGCCGTCCACACGTGCAAGCCGAGCACG | |
| | TGGCTCATCACCACGAGTCAGACAACCACGTGCTCACTGACCA | |
| | CGTGCCTGTCGGCCACGTGTGAGTCCACACGTGCATCCCGAGC | |
| | ACGTGGCTCCGAATATCCGC | |
| Synthetic | CGTACGTGCGGCAGCCCGGACGTGCGCCATCTGCGTGAGGAC | 7 |
| Promoter | GCGCGTGACAACTCGTACGTGCGGCGTCCCGGACGTGCGCCG | |
| 7 | AGTGCGTGAGTCCGCGCGTGACACCGAATTCCTGCCCTACTGA | |
| | CACTGCCTGCCGCGTACGTGCGGCAGCCCGGACGTGCGCCATC | |
| | TGCGTGAGGACGCGCGTGACAACTCGTACGTGCGGCGTCCCG | |
| | GACGTGCGCCGAGTGCGTGAGTCCGCGCGTGACACCGAATAT | |
| | CCGC | |
| Synthetic | CTCATTTCAAAAAAGCCCCATTTAAGAGTATCCTCATTTCAGA | 8 |
| Promoter | TTGACTATTTGGTAAACTATATTTGGCAATGCACGTCGTATTTT | |
| 8 | GCAATGGCTGAGCTCATTTCAAAAATCCCCCATTTAAGAGTCG | |
| | AATTCCTGCCCTACTGACACTGCCTGCCGCTCATTTCAAAAAA | |
| | GCCCCATTTAAGAGTATCTATTTGGTAAGACCTCATTTCAGATT | |
| | ACTGTATTTTGCAATGGCTGTCATATTTGGCAATGCACGAGCC | |
| | CATTTAAGAGTTCCCTCATTTCAAAAACGAATATCCGC | |
| Synthetic | CCGCGAGGAGGCAGAGCTGACCACTAGATGGCAGTAATCTGG | 9 |
| Promoter | CCACCAGAGGGCGCGACTCGCCACTAGGTGGCGCACTTGGCC | |
| 9 | ACCAGGGGGCGCCAGTCCCGCGAGGAGGCAGGAGTGGCCACC | |
| | AGAGGGCGCCGAATTCCTGCCCTACTGACACTGCCTGCCGTCG | |
| | CCACTAGGTGGCGCAGCTGGCCACCAGGGGGCGCCAGACCCG | |
| | CGAGGAGGCAGACTTGACCACTAGATGGCAGTAGAGTGGCCA | |
| | CCAGGGGGCGCCATCCTCGCCACTAGGTGGCGCCGAATATCCG | |
| | C | |
| Synthetic | CGACCATCTGGTAGCCGAACATCTGTTATCCGACCATCTGTTG | 10 |
| Promoter | ACCCACCTGCCCGACTCCAGCTGCTCGGTCCGACCATCTGGTG | |
| 10 | AGCCACCTGCCCGTCCCGACCATCTGTTCGAATTCCTGCCCTA | |
| | CTGACACTGCCTGCCGCCACCTGCCCGAGCCCAGCTGCTCGAT | |
| | CCGACCATCTGGTGACCGAACATCTGTTACTCCAGCTGCTCGG | |
| | TCCCACCTGCCCGGAGCCAGCTGCTCGTCCCGACCATCTGGTC | |
| | GAATATCCGC | |
| Synthetic | CTGATTGGCCAAAGCCTGATTGGCCAAATCCTGATTGGCCAAG | 11 |
| Promoter | ACCTGATTGGCCAAACTCTGATTGGCCAAGTCTCTGATTGGCC | |
| 11 | AAGGAGCTGATTGGCCAATCCCTGATTGGCCAACGAATTCCTG | |
| | CCCTACTGACACTGCCTGCCGCTGATTGGCCAAAGCCTGATTG | |
| | GCCAAATCCTGATTGGCCAAGACCTGATTGGCCAAACTCTGAT | |
| | TGGCCAAGTCCTGATTGGCCAAGAGCTGATTGGCCAATCCCTG | |
| | ATTGGCCAACGAATATCCGC | |
| Synthetic | AAACAGGAAGTTCGTAGCCCAACCGGAAGTATCAACCGGAAG | 12 |
| Promoter | TAGACGACCGGAAGTAACTGACCGGAAGTAGTCGACCGGAAG | |
| 12 | TGGAGAAACAGGAAGTTCGTTCCCCAACCGGAAGTCGAATTC | |
| | CTGCCCTACTGACACTGCCTGCCGGACCGGAAGTAAGCAACCG | |
| | GAAGTAATCGACCGGAAGTGGACAAACAGGAAGTTCGTACTC | |
| | CAACCGGAAGTGTCAACCGGAAGTAGAGGACCGGAAGTATCC | |
| | GACCGGAAGTGCGAATATCCGC | |
| Synthetic | GGCCCAGGGGATGCTTTAGGCGAGCGGCCCAGGGGATGCTTT | 13 |
| Promoter | AGGCGATCGGCCCAGGGGATGCTTTAGGCGGACGGCCCAGGG | |
| 13 | GATGCTTTAGGCGACTGGCCCAGGGGATGCTTTAGGCGGTCGA | |
| | ATTCCTGCCCTACTGACACTGCCTGCCGGGCCCAGGGGATGCT | |
| | TTAGGCGAGCGGCCCAGGGGATGCTTTAGGCGATCGGCCCAG | |
| | GGGATGCTTTAGGCGGACGGCCCAGGGGATGCTTTAGGCGGT | |
| | CGGCCCAGGGGATGCTTTAGGCGCGAATATCCGC | |
| Synthetic | CGGTTGCCATGGCAACCGAGCCGGTTTCCATGGAAACAAATCA | 14 |
| Promoter | AGTTACTAGGCAAAAGGACCGGTTGCCATGGCAACCGACTAA | |
| 14 | GTTACTAGGCAAAAGGAGCGGTTTCCATGGAAACAATCCCGG | |
| | TTGCCATGGCAACCGCGAATTCCTGCCCTACTGACACTGCCTG | |
| | CCGAAGTTACTAGGCAAAAGAGCCGGTTGCCATGGCAACCGA | |
| | TCCGGTTTCCATGGAAACAAGACCGGTTGCCATGGCAACCGAC | |
| | TAAGTTACTAGGCAAAAGGTCCGGTTTCCATGGAAACAATCCG | |
| | AATATCCGC | |
| Synthetic | CCCAGGGGATGCTTTAGGCGGGAAAGTCAGAGTTTCTGCCTCC | 15 |
| Promoter | ATTTCCCAGGGGATGCTTTAGGCGGGAAAGTCAGAGTTTCTGC | |
| 15 | CTCCATTTGTCATGCATCTCAATTACCCAGGGGATGCTTTAGG | |
| | CGGGAAAGTCAGAGTTTCTGCCTCCATTTCCCAGGGGATGCTT | |
| | TAGGCGGGAAAGTCAGAGTTTCTGCCTCCATTTGGCCTGCAGG | |
| | CCCAGGGGATGCTTTAGGCGGGAAAGTCAGAGTTTCTGCCTCC | |
| | ATTTCCCAGGGGATGCTTTAGGCGGGAAAGTCAGAGTTTCTGC | |
| | CTCCATTTGTCATGCATCTCAATTACCCAGGGGATGCTTTAGG | |
| | CGGGAAAGTCAGAGTTTCTGCCTCCATTTCCCAGGGGATGCTT | |
| | TAGGCGGGAAAGTCAGAGTTTCTGCCTCCATTT | |
| Synthetic | TAGGGTGGGCGTGGCAGCCGGGGCGGGGCATCTAGGGCGGGG | 16 |
| Promoter | CCGACGGGGGGCGGGGCCACTTAGGGTGGGCGTGGCGTCCGG | |
| 16 | GGCGGGGCGAGTAGGGCGGGGCCTCCGGGGGGCGGGGCCCGA | |
| | ATTCTGCCCTACTGACACTGCCTGCCGTAGGGTGGGCGTGGCA | |
| | GCCGGGGCGGGGCATCTAGGGCGGGGCCGACGGGGGGCGGG | |
| | GCCACTTAGGGTGGGCGTGGCGTCCGGGGCGGGGCGAGTAGG | |
| | GCGGGGCCTCCGGGGGGCGGGGCCCGAATATCCGC | |
| Synthetic | CGGGTGACGTCAACGGAGCGGGCTGACGTAAACGGATCTGAC | 17 |
| Promoter | GTCAGACCAATGACGTCACGACTCGGGTGACGTCAACGGGTC | |
| 17 | GGGCTGACGTAAACGGGAGTGACGTCATCCCAATGACGTCAC | |
| | GCGAATTCTGCCCTACTGACACTGCCTGCCGCGGGTGACGTCA | |
| | ACGGAGCGGGCTGACGTAAACGGATCTGACGTCAGACCAATG | |
| | ACGTCACGACTCGGGTGACGTCAACGGGTCGGGCTGACGTAA | |
| | ACGGGAGTGACGTCATCCCAATGACGTCACGCGAATATCCGC | |
| Synthetic | CGGGTGACGTCAACGGAGCGGGCTGACGTAAACGGATCTGAC | 18 |
| Promoter | GTCAGACCAATGACGTCACGACTCGGGTGACGTCAACGGGTC | |
| 18 | GGGCTGACGTAAACGGGAGTGACGTCATCCCAATGACGTCAC | |
| | GCGAATTCTGCCCTACTGACACTGCCTGCCGCGGGTGACGTCA | |
| | ACGGAGCGGGCTGACGTAAACGGATCTGACGTCAGACCAATG | |
| | ACGTCACGACTCGGGTGACGTCAACGGGTCGGGCTGACGTAA | |
| | ACGGGAGTGACGTCATCCCAATGACGTCACGCGAATATCCGC | |
| Synthetic | TACGCGCGAAAACTGAGCGCGCCAAAATCGCTGAGCGCGAAA | 18 |
| Promoter | CGGACGGGGCGGGAAGACTTACGCGCGAAAACTGGTCGCGCC | |
| 19 | AAAGAGGCTGAGCGCGAAACGTCCGGGGCGGGAAGCGAATTC | |
| | TGCCCTACTGACACTGCCTGCCGTACGCGCGAAAACTGAGCGC | |
| | GCCAAAATCGCTGAGCGCGAAACGGACGGGGCGGGAAGACTT | |
| | ACGCGCGAAAACTGGTCGCGCCAAAGAGGCTGAGCGCGAAAC | |
| | GTCCGGGGCGGGAAGCGAATATCCGC | |
| Synthetic | TCTGATGCAATAGCGGTATGATGCAAGGAATCAGATTGTGAA | 20 |
| Promoter | ATGTGACATTGTGAAATAACTTCTGATGCAATGTCGGTATGAT | |
| 20 | GCAAGGAGAGAGATTGTGAAATGTTCCATTGTGAAATACGAA | |
| | TTCTGCCCTACTGACACTGCCTGCCGTCTGATGCAATAGCGGT | |
| | ATGATGCAAGGAATCAGATTGTGAAATGTGACATTGTGAAAT | |
| | AACTTCTGATGCAATGTCGGTATGATGCAAGGAGAGAGATTGT | |
| | GAAATGTTCCATTGTGAAATACGAATATCCGC | |
| Synthetic | TCAGCCAATCAGAGAGCGAGCCAATCAGAATCCCAGCCAATC | 21 |
| Promoter | AGAGACTGGGCCAATCAGAAACTTCAGCCAATCAGAGGTCGA | |
| 21 | GCCAATCAGAGAGCCAGCCAATCAGATCCTGGGCCAATCAGA | |
| | ACGAATTCTGCCCTACTGACACTGCCTGCCGTCAGCCAATCAG | |
| | AGAGCGAGCCAATCAGAATCCCAGCCAATCAGAGACTGGGCC | |
| | AATCAGAAACTTCAGCCAATCAGAGGTCGAGCCAATCAGAGA | |
| | GCCAGCCAATCAGATCCTGGGCCAATCAGAACGAATATCCGC | |
| Synthetic | AGCCGCACGTGACAGCAGCCGCACGTGACATCCACCCACGTG | 22 |
| Promoter | CGACCACCCACGTGCACTAGCCGCACGTGACCACAGCCGCAC | |
| 22 | GTGACGAGCACCCACGTGCTCCCACCCACGTGCCGAATTCTGC | |
| | CCTACTGACACTGCCTGCCGAGCCGCACGTGACAGCAGCCGCA | |
| | CGTGACATCCACCCACGTGCGACCACCCACGTGCACTAGCCGC | |
| | ACGTGACCATCAGCCGCACGTGACGAGCACCCACGTGCTCCCA | |
| | CCCACGTGCCGAATATCCGC | |
| Synthetic | GACCACGTGGAAGCGACCACGTGGAATCCGCCACGTGCGCGA | 23 |
| Promoter | CCGCCACGTGCGCACTAGACCACGTGGTCGTCAGACCACGTGG | |
| 23 | TCGAGAAAACACGTGGTTCCAAAACACGTGGTCGAATTCTGCC | |
| | CTACTGACACTGCCTGCCGGACCACGTGGAAGCGACCACGTG | |
| | GAATCCGCCACGTGCGCGACCGCCACGTGCGCACTAGACCAC | |
| | GTGGTCGTCAGACCACGTGGTCGAGAAAACACGTGGTTCCAA | |
| | AACACGTGGTCGAATATCCGCG | |
| Synthetic | TAGCCTGGGGCCGAGCTAGCCTGGGGCCGATCACCGCCTGAG | 24 |
| Promoter | GGGAGACACCGCCTGAGGGGAACTTGCCCTGGGGCCGTCTGC | |
| 24 | CCTGGGGCCGAGTTGCCCTAGGGCATTCCTTGCCCTAGGGCAT | |
| | CGAATTCTGCCCTACTGACACTGCCTGCCGTAGCCTGGGGCCG | |
| | AGCTAGCCTGGGGCCGATCACCGCCTGAGGGGAGACACCGCC | |
| | TGAGGGGAACTTGCCCTGGGGCCGTCTGCCCTGGGGCCGAGTT | |
| | GCCCTAGGGCATTCCTTGCCCTAGGGCATCGAATATCCGC | |
| Synthetic | GGGAATTCCCAGCGGGAATTCCCATCGGGGACTTTCCAGACGG | 25 |
| Promoter | GGACTTTCCAACTGGGAATTCCCGTCGGGAATTCCCGAGGGGG | |
| 25 | ACTTTCCATCCGGGGACTTTCCACGAATTCTGCCCTACTGACA | |
| | CTGCCTGCCGGGGAATTCCCAGCGGGAATTCCCATCGGGGACT | |
| | TTCCAGACGGGGACTTTCCAACTGGGAATTCCCGTCGGGAATT | |
| | CCCGAGGGGGACTTTCCATCCGGGGACTTTCCACGAATATCCG | |
| | C | |
| Synthetic | AGCGCATTTCCCGGAAATGATATCTATTCCAGGAACTGACTAT | 26 |
| Promoter | TCCAGGAACTACTGCATTTCCCGGAAATGATGTCGCATTTCCC | |
| 26 | GGAAATGATGAGTATTCCAGGAACTTCCTATTCCAGGAACTCG | |
| | AATTCTGCCCTACTGACACTGCCTGCCGGCATTTCCCGGAAAT | |
| | GATAGCGCATTTCCCGGAAATGATACTATTCCAGGAACTACTG | |
| | CATTTCCCGGAAATGATGTCGCATTTCCCGGAAATGATGAGTA | |
| | TTCCAGGAACTTCCTATTCCAGGAACTCGAATATCCG | |
| Synthetic | ATGCGTGGGCGTAGCATGCGTGGGCGTATCCGCGGCGGGGGC | 27 |
| Promoter | GGAGGACCGCGGCGGGGGCGGAGACTAATGCGGGGGCGGAG | |
| 27 | TCAATGCGGGGGCGGAGAGGGGCGGGGGCGGGGCCTCCGGGC | |
| | GGGGGCGGGGCCCGAATTCTGCCCTACTGACACTGCCTGCCGA | |
| | TGCGTGGGCGTACATGCGTGGGCGTATCCGCGGCGGGGGCGG | |
| | AGGCCGCGGCGGGGGCGGAGCTAATGCGGGGGCGGAGTCAAT | |
| | GCGGGGGCGGAGAGGGGCGGGGGCGGGGCCTCCGGGCGGGG | |
| | GCGGGGCCCGAATATCCGC | |
| Synthetic | GCGCCAAAGGAACGTTTCGGGAATTCGGGAAACGGATGCGCC | 28 |
| Promoter | AAAGCTCGAGTACGAAACGGCTACGTTTCGGCTGGAAACGCA | |
| 28 | GGCAGTGTCAGTAGGGCAGCGCCAAAGGAACGTTTCGGGAAT | |
| | TCGGGAAACGGATGCGCCAAAGCTCGAGTACGAAACGGCTAC | |
| | GTTTCGGCTGGAAACGGG | |
| Synthetic | GCGCCAAAGGAACGTTTCGGGAATTCGGGAAACGGATGCGCC | 29 |
| Promoter | AAAGCTCGAGTACGAAACGGCTACGTTTCGGCTGGAAACGCA | |
| 29 | GGCAGTGTCAGTAGGGCAGCGCCAAAGGAACGTTTCGGGAAT | |
| | TCGGGAAACGGATGCGCCAAAGCTCGAGTACGAAACGGCTAC | |
| | GTTTCGGCTGGAAACGCAGGCAGTGTCAGTAGGGCAGCGCCA | |
| | AAGGAACGTTTCGGGAATTCGGGAAACGGATGCGCCAAAGCT | |
| | CGAGTACGAAACGGCTACGTTTCGGCTGGAAACGCAGGCAGT | |
| | GTCAGTAGGGCAGCGCCAAAGGAACGTTTCGGGAATTCGGGA | |
| | AACGGATGCGCCAAAGCTCGAGTACGAAACGGCTACGTTTCG | |
| | GCTGGAAACGGG | |
| Synthetic | GCGGATATTCGGCGCCACCTAGTGGCGAGGATGGCGCCCCCTG | 30 |
| Promoter | GTGGCCACTCTACTGCCATCTAGTGGTCAAGTCTGCCTCCTCG | |
| 30 | CGGGTCTGGCGCCCCCTGGTGGCCAGCTGCGCCACCTAGTGGC | |
| | GACGGCAGGCAGTGTCAGTAGGGCAGGAATTCGGCGCCCTCT | |
| | GGTGGCCACTCCTGCCTCCTCGCGGGACTGGCGCCCCCTGGTG | |
| | GCCAAGTGCGCCACCTAGTGGCGAGTCGCGCCCTCTGGTGGCC | |
| | AGATTACTGCCATCTAGTGGTCAGCTCTGCCTCCTCGCGG | |
| Synthetic | GCGGATATTCGACCAGATGGTCGGGACGAGCAGCTGGCTCCG | 31 |
| Promoter | GGCAGGTGGGACCGAGCAGCTGGAGTAACAGATGTTCGGTCA | |
| 31 | CCAGATGGTCGGATCGAGCAGCTGGGCTCGGGCAGGTGGCGG | |
| | CAGGCAGTGTCAGTAGGGCAGGAATTCGAACAGATGGTCGGG | |
| | ACGGGCAGGTGGCTCACCAGATGGTCGGACCGAGCAGCTGGA | |
| | GTCGGGCAGGTGGGTCAACAGATGGTCGGATAACAGATGTTC | |
| | GGCTACCAGATGGTCG | |
| Synthetic | GACCACGTGGAAAGCGACCACGTGGAAATCGACCACGTGGAA | 32 |
| Promoter | GACGACCACGTGGAAACTGACCACGTGGAAGTCGACCACGTG | |
| 32 | GAAGAGGACCACGTGGAATCCGACCACGTGGAAGAATTCTGC | |
| | CCTACTGACACTGCCTGCCGGACCACGTGGAAAGCGACCACGT | |
| | GGAAATCGACCACGTGGAAGACGACCACGTGGAAACTGACCA | |
| | CGTGGAAGTCGACCACGTGGAAGAGGACCACGTGGAATCCGA | |
| | CCACGTGGAACGAATATCCGC | |
| Synthetic | TCCGCCACGTGCGCGACGACTCCGCCACGTGCGCGACACTTCC | 33 |
| Promoter | GCCACGTGCGCGACGTCTCCGCCACGTGCGCGACGAGTCCGCC | |
| 33 | ACGTGCGCGACTCCTCCGCCACGTGCGCGACCGAATTCTGCCC | |
| | TACTGACACTGCCTGCCGTCCGCCACGTGCGCGACGACTCCGC | |
| | CACGTGCGCGACACTTCCGCCACGTGCGCGACGTCTCCGCCAC | |
| | GTGCGCGACGAGTCCGCCACGTGCGCGACTCCTCCGCCACGTG | |
| | CGCGACCGAATATCCGC | |
| Synthetic | AGACCACGTGGTCAGCAGACCACGTGGTCATCAGACCACGTG | 34 |
| Promoter | GTCGACAGACCACGTGGTCACTAGACCACGTGGTCGTCAGACC | |
| 34 | ACGTGGTCGAGAGACCACGTGGTCTCCAGACCACGTGGTCCG | |
| | AATTCTGCCCTACTGACACTGCCTGCCGAGACCACGTGGTCAG | |
| | CAGACCACGTGGTCATCAGACCACGTGGTCGACAGACCACGT | |
| | GGTCACTAGACCACGTGGTCGTCAGACCACGTGGTCGAGAGA | |
| | CCACGTGGTCTCCAGACCACGTGGTCCGAATATCCGC | |
| Synthetic | AAAACACGTGGTAGCAAAACACGTGGTATCAAAACACGTGGT | 35 |
| Promoter | GACAAAACACGTGGTACTAAAACACGTGGTGTCAAAACACGT | |
| 35 | GGTGAGAAAACACGTGGTTCCAAAACACGTGGTCGAATTCTG | |
| | CCCTACTGACACTGCCTGCCGAAAACACGTGGTAGCAAAACA | |
| | CGTGGTATCAAAACACGTGGTGACAAAACACGTGGTACTAAA | |
| | ACACGTGGTGTCAAAACACGTGGTGAGAAAACACGTGGTTCC | |
| | AAAACACGTGGTCGAATATCCGC | |
| Synthetic | GTCCGCCACGTGCGCGACAGTCCGCCACGTGCGCGACTGGTCC | 36 |
| Promoter | GCCACGTGCGCGACCGTCCGCCACGTGCGCGACCGGTCCGCCA | |
| 36 | CGTGCGCGACCGTCCGCCACGTGCGCGACGTGTCCGCCACGTG | |
| | CGCGCC | |
| Synthetic | TTCCGCCACGTGGCGGAAGTTCCGCCACGTGGCGGAATTCCGC | 37 |
| Promoter | CACGTGGCGGAAATTCCGCCACGTGGCGGAATTCCGCCACGTG | |
| 37 | GCGGAATTTCCGCCACGTGGCGGAATTCCGCCACGTGGCGGA | |
| | ACC | |
| Synthetic | GCCACGTGAGCGCCACGTGATCGCCACGTGGACGCCACGTGA | 38 |
| Promoter | CTGCCACGTGAGTGCCACGTGGTCGCCACGTGGATGCCACGTG | |
| 38 | GCTGCCACGTG | |
| Synthetic | GCGGATATTCGACCACGTGTTTTGGAACCACGTGTTTTCTCGA | 39 |
| Promoter | CCACGTGGTCTGACGACCACGTGGTCTAGTGCGCACGTGGCGG | |
| 39 | TCGCGCACGTGGCGGATTCCACGTGGTCGCTTCCACGTGGTCC | |
| | GGCAGGCAGTGTCAGTAGGGCAGAATTCGACCACGTGTTTTGG | |
| | AACCACGTGTTTTCTCGACCACGTGGTCTGACGACCACGTGGT | |
| | CTAGTGCGCACGTGGCGGTCGCGCACGTGGCGGATTCCACGTG | |
| | GTCGCTTCCACGTGGTCC | |
| Synthetic | GGCCGCCCTGCACCTGCAGGGACCACGTGGAAGCGACCACGT | 40 |
| Promoter | GGAATCCGCCACGTGCGCGACCGCCACGTGCGCACTAGACCA | |
| 40 | CGTGGTCGTCAGACCACGTGGTCGAGAAAACACGTGGTTCCA | |
| | AAACACGTGGTCGAATTCTGCCCTACTGACACTGCCTGCCGGA | |
| | CCACGTGGAAGCGACCACGTGGAATCCGCCACGTGCGCGACC | |
| | GCCACGTGCGCACTAGACCACGTGGTCGTCAGACCACGTGGTC | |
| | GAGAAAACACGTGGTTCCAAAACACGTGGTCGAATATCCGCG | |
| | GCGCGCCAGACGTGCAGGGACCACGTGGAAGCGACCACGTGG | |
| | AATCCGCCACGTGCGCGACCGCCACGTGCGCACTAGACCACGT | |
| | GGTCGTCAGACCACGTGGTCGAGAAAACACGTGGTTCCAAAA | |
| | CACGTGGTCGAATTCTGCCCTACTGACACTGCCTGCCGGACCA | |
| | CGTGGAAGCGACCACGTGGAATCCGCCACGTGCGCGACCGCC | |
| | ACGTGCGCACTAGACCACGTGGTCGTCAGACCACGTGGTCGA | |
| | GAAAACACGTGGTTCCAAAACACGTGGTCGAATATCCGCGGC | |
| | GCGCCAGAC | |

### Example 2

### Synthetic Promoter Activity and Specificity—Synthetic Promoters 41-49

[0141] Reporter constructs were created by placing the coding sequence of mKate2 under the control of selected promoters from the library (synthetic promoters 41-49). The reporter constructs were transfected into different cell lines as listed in Table 3. P119 are negative control cells and p153 are mKate2 positive cells expressing mKate2 under the strong hUbC promoter.

[0142] The expression of mKate2 indicates the activity of a synthetic promoter in each cell line. The results were provided in FIG. 8 and Table 2. Synthetic promoters 41 and 44 were found to be more active than other synthetic promoters tested in tumor cell lines. Interestingly, both synthetic promoter 41 and 44 have binding motifs for tumor-specific TFs, including CREB, EGR1, SP1 and E2F1. The activities of another set of synthetic promoters were tested in different cell lines, as indicated in Table 3.

TABLE 3
Synthetic Promoter Activity in Different Cell Lines

| | NB508 | 4T1 | OVCAR8 |
|---|---|---|---|
| | AVRG | AVRG | AVRG |
| | mKate2 | mKate2 | mKate2 |
| p119 | 35 | 56 | 50 |
| p153 | 21200 | 14200 | 79800 |
| Synthetic Promoter 41 | 1203 | 677 | 13400 |
| Synthetic Promoter 42 | 39 | 60 | 73 |
| Synthetic Promoter 43 | 42 | 62 | 93 |
| Synthetic Promoter 44 | 1743 | 1555 | 2956 |
| Synthetic Promoter 45 | 42 | 59 | 137 |
| Synthetic Promoter 46 | 39 | 54 | 75 |
| Synthetic Promoter 47 | 72 | 82 | 507 |
| Synthetic Promoter 48 | 139 | 110 | 3553 |
| Synthetic Promoter 49 | 53 | 64 | 246 |

TABLE 4
Synthetic Promoters 41-49

| Name | Sequence | SEQ ID NO. |
|---|---|---|
| Synthetic Promoter 41 | GACGCCATGACGCATGACGCCATGACGCCATGACGCCA | 41 |
| | TGACGCCATGACGCCATGACGCATGACGCCATGACGCC | |
| | ATGACGCCATTACGCCAT | |
| Synthetic Promoter 42 | GGGGGTCCAGCGGGGGTCCATCGGGGGTCCGACGGGGG | 42 |
| | TCCACTGGGGGTCCAGTGGGGGTCCGTCGGGGGTCCGAT | |
| | GGGGGTCCGCTGGGGGTCC | |
| Synthetic Promoter 43 | AGTGGGGTAGCAGTGGGTATCAGTGGGGTGACAGTGGG | 43 |
| | GTACTAGTGGGGTAGTAGTGGGGTGTCAGTGGGGTGAT | |
| | AGTGGGGTGCTAGTGGGGT | |
| Synthetic Promoter 44 | GTGCCCGCGTAATCCCGCCCGCGTAGACCCGCCCGCGTA | 44 |
| | ACTCCGCCCGCGTAAGTCCGCCCGCGTAGTCCCGCCCGC | |
| | GTAGATCCGCCCGCGTA | |
| Synthetic Promoter 45 | GAGACATAGAGACATAGAGACATAGAGACATAGAGACA | 45 |
| | TAGAGACATAGAGACATAGAGACATAGAGACATAGAGA | |
| | CATAGAGACATAGAGACATA | |
| Synthetic Promoter 46 | CACTGGGTCACGGGGTCACGGGGTCACGGGGTCACGGG | 46 |
| | GTCACGGGGTCACGGGGTCACGGGGTCACGGGGTCACG | |
| | GGGTCACGGGGT | |
| Synthetic Promoter 47 | GGGAATGAGGGAATGAGGGAATGAGGGAATGAGGGAA | 47 |
| | TGAGGGAATGAGGGAATGAGGGAATGAGGGAATGTGGG | |
| | AATGTGGGAATGTGGGAATGT | |
| Synthetic Promoter 48 | GAAGGCAGGAAGGCAGGAAGGCAGGAAGGCAGGAAGG | 48 |
| | CAGGAAGGCAGGAAGGCAGGAAGGCAGGAAGGCAGGA | |
| | AGGCAGGAAGGCAGGAAGGCAG | |
| Synthetic Promoter 49 | GGGCCAAATGGATCGGGCCAAATGGGACGGGGCAAATG | 49 |
| | GACTGGGCAAATGGAGTGGGGCAAATGGGTCGGGCAAA | |
| | TGGGATGGGGCAAATGG | |

### Example 3

### MDA-MB-453-Specific Promoter Expression

[0143] Two synthetic promoters, S(USF1)p and S(MAFK)p, were designed to specifically target the MDA-MB-453 breast cancer cell line, but not the MCF-10A non-tumorigenic mammary epithelial cell line. mKate2 outputs generated by each promoter individually were compared to a control (G8-Pe) in both cell lines. S(USF1)p and S(MAFK)p generated a high output only in MDA-MB-453 cells (FIG. 9) (see also Nissim, L. et al. Cell 2017; 171: 1138-1150 is incorporated herein by reference).

S(USF1)p
(SEQ ID NO: 12266)
CCACGTGCAGACCACGTGCTCGCCACGTGCGACCCACGTGCCTACCACGT
GCACTCCACGTGCTGCCCACGTGCGTACCACGTGCG
S(MAFK)p
(SEQ ID NO: 12268)
TGCTGAGTCAGCAAGATGCTGAGTCAGCATCGTGCTGAGTCAGCAGACTG
CTGAGTCAGCACTATGCTGAGTCAGCAACTTGCTGAGTCAGCATGCTGCT
GAGTCAGCAGTATGCTGAGTCAGCAG

### Example 4

### Synthetic Promoter Activity and Specificity

[0144] Reporter constructs were created by placing the coding sequence of mKate2 under the control of selected promoters from the library (see FIG. 10). The reporter constructs were transfected into different cell lines: 10A (normal breast tissue cells) or MDA (cancerous breast tissue cells).

[0145] The expression of mKate2 indicates the activity of a synthetic promoter in each cell line. The results are provided in FIG. 10. A subset of the synthetic promoters was found to be more active in the tumor cell line than the other synthetic promoters tested.

### Example 5

[0146] The synthetic promoter library was tested in a human induced pluripotent stem cell line (GATA6-hiPSCs) that forms a liver bud-like organoid upon doxycycline-inducible GATA6 expression (Guye, P. et al. Nature Communications, 2016, incorporated herein by reference). 2D organoids were prepared by seeding 25,000 GATA6-hiPSCs/cm² in a flat-bottom, matrigel-coated tissue-culture plate. Differentiation followed the previously described protocol (Guye, P. et al. Nature Communications, 2016) and was initiated by addition of 1000 ng/mL doxycycline (dox) for 5 days. On day 5, organoids were transduced with an equimolar mix of the synthetic promoter library and a transduction control. The viral titer was qualitatively adjusted such that <15% of the population expressed the transduction marker. Differentiation continued for a total of 16 days after which organoids were washed with PBS and dissociated with Accutase to a single cell suspension. Cells were centrifuged (3 min at 300×g) and resuspended in APEL 2 Medium (StemCell Technologies). The resuspended cells were sorted by FACS (BD FACS Aria, BD Biosciences) into an mKate positive and negative population with manually defined gates. Extraction of genomic DNA (gDNA) was done as for all other samples.

[0147] Using the gDNA from the mKate positive population, we amplified the synthetic promoters by PCR as described for the other samples with the exception that 50 cycles were necessary. The amplified promoter library and pLN490 were digested with Asci and Sbfl and gel purified. The digested and purified promoters and pLN490 backbone were ligated and transformed into E. coli and selected for by ampicillin. Colonies were picked and submitted for Sanger sequencing to identify synthetic promoters that led to mKate expression in the organoids. Candidate promoters identified from Sanger sequencing were verified in triplicate. Verification was done by transducing undifferentiated GATA6-hiPSCs with a lentivirus expressing the particular promoter upstream of mKate2. Transductions were done with 2 μg/mL polybrene and qualitatively assessed to lead to mKate2 expression in more than 90% of the GATA6-hiPSCs. Organoids were differentiated as above and imaged daily for 20 days using a Leica TCS SP5 II confocal microscope. Each promoter was also expressed in GATA6-hiPSCs that were kept undifferentiated for >5 days by culturing cells in mTeSR1 without the addition of dox.

[0148] Expression of the synthetic promoter library in a liver bud-like organoid derived through GATA6 expression in hiPSCs, led to the identification of 37 different candidate promoters from a pool of 1396 mKate positive cells. Each promoter was individually verified by transduction of GATA6-hiPSCs with the particular promoter and repeating the differentiation to a liver bud-like organoid. We verified 18 of these promoters in triplicate and found 7 of them to be mKate2 positive in all samples. 2 of the promoters were only mKate2 positive in duplicate. Among these 9 promoters with mKate2 activity, 8 also had detectable activity in undifferentiated GATA6-hiPSCs (activity could be verified in triplicate for 4 promoters, duplicate for 1, and single sample only for 3 promoters). However, their activity in GATA6-hiPSCs were generally limited to clusters of with few cells, indicating that there might be subtle differences in the transcription factor profile of these undifferentiated stem cell.

[0149] The synthetic promoters with RELA, STAT_disc5, HIF1A and TP53 binding sites showed consistent behavior across all triplicates. The activity and pattern of these promoters changed between days, implying cell type-specific promoter activity. Moreover, the pattern, strength and number of cells in which the promoter was active also varied. For instance, the HIF1A promoter appeared active in large globular similar to previously identified ectoderm-derived cells (P. Guye, 2016). Moreover, the signal shows a pattern within these globular structures, indicating further cell type-specificity. The mKate2 expression appeared suddenly late in organoid development (≈day 15) and gradually disappear. As the signal faded from the putative ectoderm regions, it would begin to appear in nearby regions of the organoid that favored a flat structure.

[0150] TP53, and STAT_disc5 were both active early on during organoid development and with no apparent preference for morphologically distinct cells. TP53 was widely active in hiPSCs and the early (day 2) organoid. The frequency of mKate2 positive cells faded over time, albeit the signal remained strong in the few positive cells that remained. STAT_disc5 was not active in hiPSCs, but turned on around day 3 and peaked at day 4/5. It then gradually turned off as the organoid matured and had effectively disappeared on day 12.

[0151] RELA turned on strongly, first in a few cells around day 4, but continuously spread to a larger fraction of the cell population over the duration of the experiment. The promoter appeared to favor certain regions with a flat morphology. Moreover, several cells—based on their mKate2 fluorescence—showed a long, thin shape which is morphologically distinct from the pattern observed from other promoters.

[0152] Overall, verification of mKate2 expression from the candidate promoters also revealed heterogeneous expression of the promoters that generally required screening multiple regions of each organoid to identify an mKate positive region. This implies that morphologically similar regions might still show subtle differences in TF profiles that affects transcription from the synthetic promoter. Altogether, the replicated temporal, spatial and morphological observations indicate a non-random preference for certain cell types that appear and mature during development of a liver bud-like organoid.

[0153] The previously described method to differentiate hiPSCs to a liver bud-like organoid results in a heterogeneous and diverse cell composition within the organoid with cell lineages arising from all three different germ layers. This cell type heterogeneity made the organoid ideal as a platform to test the cell-type preference of the synthetic promoter library.

[0154] Changes in the TF profile of a specific cells is quintessential to cell differentiation and maturation, and the synthetic promoters are expected to exploit this change, thereby providing a platform for cell-type specific gene regulation. Indeed, we find that a few candidate promoters show temporal specificity towards certain morphologically distinct regions within the organoid. However, the promoter activity often differs between morphologically similar regions implying the promoters may be very sensitive towards changes in TF activity between cell types. With thorough screening and a more targeted search for specific cell populations, the synthetic promoters are a powerful tool for regulating gene networks in subpopulations of heterogeneous cell populations.

TABLE 5
Transcription Factor Binding Sites of Synthetic Promoters

| Name | Binding Site Sequence | Reverse Complement |
|---|---|---|
| EOMES_EOMES_f1_HocoMoco | ATTTCGTATCCCCG | CGGGGATACGAAAT |
| LHX9_LHX2_2_SELEX\|LHX2_3 | TAATTACGCTAATTA | TAATTAGCGTAATTA |
| HOXC5_Zen_Cell_FBgn0004053_B1H | CCCTAATGA | TCATTAGGG |
| BARHL2_MA0171.1_B1H\|NKX2- | CAATTAA | TTAATTG |
| 5_MA0063.1_SELEX\|ISL2_MA0248.1_B1H\|BARHL2_MA01 | | |
| 68.1_B1H\|HMX1_Hmx_SOLEXA_FBgn0085448_B1H\|BSX_ | | |
| MA0214.1_B1H\|ISL2_Tup_SOLEXA_FBgn0003896_B1H\|SH | | |
| OX_PRRX2_f1_HocoMoco\|SHOX_MA0250.1_B1H\|HMX1_ | | |
| Hmx_Cell_FBgn0085448_B1H\|ISL2_Isl2_3430_PBM\|BARH | | |
| L2_MA0169.1_B1H\|HMX1_MA0192.1_B1H\|NKX2-5_4 | | |
| NKX2-5_NKX28_f1_HocoMoco | GTCCTTGAA | TTCAAGGAC |
| EN2_V$EN1_01_Transfac\|EN1_1 | CAATTAC | GTAATTG |
| NR1l3_NR1l3_f2_HocoMoco | CTGAACTTTCCTGACCCC | GGGGTCAGGAAAGTTC |
| | | AG |
| MSX1_Msx1_3031_PBM\|GBX2_Gbx2_3110_PBM | CAATTAG | CTAATTG |
| GATA2_MA0536.1_ChIP-chip | AACTATCGATA | TATCGATAGTT |
| DLX2_1 | CTGAAGTAATTATTCC | GGAATAATTACTTCAG |
| VSX2_VSX1_2_SELEX\|VSX1_3 | GCTAATTAGCC | GGCTAATTAGC |
| SIX5_Six4_SOLEXA_2_FBgn0027364_B1H | ATGATACC | GGTATCAT |
| SIX5_Six4_Cell_FBgn0027364_B1H | ATTTGATAC | GTATCAAAT |
| OVOL2_1 | CCCCCGC | GCGGGGG |
| ELF1_known1 | ATAAGAGGAAAT | ATTTCCTCTTAT |
| HNF1A_HNF1B_f1_HocoMoco | GGTTAATGATTAAC | GTTAATCATTAACC |
| RXRA_known7 | GTAGGGCAAAGGTCA | TGACCTTTGCCCTAC |
| NFKB1_V$NFKB_C_Transfac\|NFKB_known5 | GGGGACTTTCCA | TGGAAAGTCCCC |
| NR5A1_ftz-f1_FlyReg_FBgn0001078_B1H | CAGTCCGAAGGTCACCG | GCGGTGACCTTCGGACT |
| | C | G |
| KLF4_SRP000217_Klf4_ChIP-seq | GGCCCCACCCA | TGGGTGGGGCC |
| SOX9_SOX10_si_HocoMoco | ACAAAGA | TCTTTGT |
| DMBX1_DRGX_1_SELEX\|DRGX_1 | CTAATCTAATTAA | TTAATTAGATTAG |
| DMBX1_pTH5511_PBM\|DRGX_CRX_si_HocoMoco | CTAATCCC | GGGATTAG |
| NFYA_V$NFY_C_Transfac\|NFY_known2 | ACTAACCAATCAGA | TCTGATTGGTTAGT |
| HNF4G_Hnf4_SANGER_10_FBgn0004914_B1H | TGACCCCGCCAACAA | TTGTTGGCGGGGTCA |
| POU6F2_PO6F1_f1_HocoMoco | CATAATTTATGCA | TGCATAAATTATG |
| HOXC5_HXC6_f1_HocoMoco | AAAGTAATAAATCAT | ATGATTTATTACTTT |
| VSX2_pTH5821_PBM\|SHOX_pTH5474_PBM\|EN2_inv_SOL | CTAATTAAC | GTTAATTAG |
| EXA_2_FBgn0001269_B1H\|POU3F3_pTH9216_PBM | | |
| DMRTC2_pTH3205_PBM | AACATGTATAAAA | TTTTATACATGTT |
| MLX_MLX_1_SELEX\|MLXIPL_MLXIPL_1_SELEX\|MLX_MIx_1 | ATCACGTGAT | ATCACGTGAT |
| _SELEX\|MLXIPL_1\|MLX_1\|MLX_2 | | |
| SNAI2_wor_SOLEXA_2.5_FBgn0001983_B1H | CCACCTGC | GCAGGTGG |
| SOX1_SRP000712_Sox2_ChIP- | CCATTGTTATGCAAA | TTTGCATAACAATGG |
| seq\|BX088580.2_SRP000217_Oct4_ChIP- | | |
| seq\|SOX1_SRP000217_Sox2_ChIP-seq | | |
| TGIF1_MA0252.1_B1H\|TGIF1_MA0207.1_B1H\|PKNOX2_M | CTGTCA | TGACAG |
| A0227.1_B1H | | |
| POU3F3_V$POU3F2_01_Transfac\|POU3F2_2 | ATGAATTAATGCAT | ATGCATTAATTCAT |
| HOXA4_MA0228.1_B1H\|SHOX_Prrx2_3072_PBM\|DMBX1_ | CTAATTA | TAATTAG |
| Alx3_3418_PBM\|PROP1_Prop1_3949_PBM\|UNCX_MA019 | | |
| 8.1_B1H\|UNCX_Odsh_Cell_FBgn0026058_B1H\|SHOX_MA | | |
| 0200.1_B1H\|LHX1_Lhx4_1719_PBM\|EN2_En1_3123_PBM | | |
| \|LHX9_MA0209.1_B1H\|ALX1_MA0202.1_B1H\|ALX1_MA0 | | |
| 184.1_B1H | | |
| SOX5_3 | ATTTTATTGTTCTAAA | TTTAGAACAATAAAAT |
| BHLHE40_BHLHB2_1_SELEX\|SREBF2_Srebf1_1_SELEX\|MIT | ATCACGTGAC | GTCACGTGAT |
| F_TFEB_1_SELEX\|MITF_TFE3_1_SELEX\|USF1_USF1_1_SELE | | |
| X\|SREBF2_SREBF2_1_SELEX\|MITF_TFEC_1_SELEX\|BHLHE4 | | |
| 0_known3\|SREBP_known5\|SREBP_known6\|TFE3_1\|TFEB | | |
| _1\|MYC_known22\|TFEC_1 | | |
| ZNF187_Zfp187_2626_PBM | ATTAGTAC | GTACTAAT |
| SIX2_MA0246.1_B1H\|SIX5_MA0204.1_B1H | GTATCA | TGATAC |
| GLIS3_GLIS3_1_SELEX\|GLIS3_1 | CTTCGTGGGGGGTC | GACCCCCCACGAAG |
| ENSG00000250096_MA0002.2_ChIP-seq\|RUNX1_9 | AAACCACAGAC | GTCTGTGGTTT |
| SOX1_SOX2_1_SELEX\|SOX2_2 | GAACAATACCATTGTTC | GAACAATGGTATTGTTC |
| LMX1A_1 | CGAATTAATTAAAAACC | GGTTTTTAATTAATTCG |
| RORB_V$RORA2_01_Transfac\|RORA_2 | ATAAGTAGGTCAA | TTGACCTACTTAT |
| HSF1_MA0486.1_ChIP-seq | AGAACCTTCTAGAAG | CTTCTAGAAGGTTCT |
| NKX6-3_V$NKX61_01_Transfac\|NKX6-1_1 | AACCAATTAAAAA | TTTTTAATTGGTT |
| ENSG00000250096_RUNX2_f1_HocoMoco | ACAAACCACAG | CTGTGGTTTGT |
| FOXD1_V$FREAC4_01_Transfac\|FOXD1_1 | CCATTGTTTACTTAAG | CTTAAGTAAACAATGG |
| DDIT3::CEBPA_1 | AGATGCAATCCCC | GGGGATTGCATCT |
| LHX1_Lhx5_2279_PBM\|LHX1_Lhx1_2240_PBM | AATTAATTA | TAATTAATT |
| TCF7L1_TCF7L1_1_SELEX\|TCF7L2_Tcf7_1_SELEX\|TCF7L1_2 | AAAGATCAAAGG | CCTTTGATCTTT |
| \|TCF7_2 | | |
| MEF2_known2 | AAGCTATAAATAGACT | AGTCTATTTATAGCTT |
| PAX9_PAX5_si_HocoMoco | CCTCAGCC | GGCTGAGG |
| SP9_K562_SP2_HudsonAlpha_ChIP-seq | GCCTAGAGCGGCCCC | GGGGCCGCTCTAGGC |
| SIX2_Six2_2307_PBM | GGGTATCA | TGATACCC |
| ZNF589_ZN589_f1_HocoMoco | CCCACGGTTACTGCCG | CGGCAGTAACCGTGGG |
| ETS_disc7 | GGACTACAGCTCCC | GGGAGCTGTAGTCC |
| LIN54_pTH8566_PBM | AATTCAAAT | ATTTGAATT |
| PDX1_2 | GAGTCTAATGACCCA | TGGGTCATTAGACTC |
| ESR2_1 | CAAGGTCACGGTGACCT | CAGGTCACCGTGACCTT |
| | G | G |
| SOX21_1 | CTTAATTATAATTAAA | TTTAATTATAATTAAG |
| STAT_known11 | GGATTCCC | GGGAATCC |
| PRKRIR_pTH9190_PBM | ATCTCGTTTGGA | TCCAAACGAGAT |
| TCF3_3 | CGGCACCTGCC | GGCAGGTGCCG |
| TET1_pTH9605_PBM | ATCGCGTTA | TAACGCGAT |
| SPDEF_SPDEF_5_SELEX\|SPDEF_6 | ATGATCCGGGACCAC | GTGGTCCCGGATCAT |
| EBF1_MA0154.2_ChIP-seq | GTCCCCAGGGA | TCCCTGGGGAC |
| ARID5A_1 | CTAATATTGCTAAA | TTTAGCAATATTAG |
| EBF1_COE1_f2_HocoMoco | GTCCCCAGGGAC | GTCCCTGGGGAC |
| DBX2_1 | GAATTAATTAATTAAA | TTTAATTAATTAATTC |
| IRF2_V$1RF2_01_Transfac\|IRF1_V$1RF1_01_Transfac\|IRF_ | GAAAAGTGAAACC | GGTTTCACTTTTC |
| known1\|IRF_known2 | | |
| SRF_MA0331.1_COMPILED | CCCAATTAGGAA | TTCCTAATTGGG |
| ELF1_ELF2_f1_HocoMoco | AGTCACTTCCTGCTA | TAGCAGGAAGTGACT |
| MYOD1_pTH5099_PBM | AACAGCTGA | TCAGCTGTT |
| ETV5_MA0076.2_ChIP-seq | CCACTTCCGGC | GCCGGAAGTGG |
| EGR3_EGR1_2_SELEX\|EGR3_EGR1_1_SELEX\|EGR1_known | AATGCGTGGGCGTA | TACGCCCACGCATT |
| 8\|EGR1_known9 | | |
| REST_disc2\|BCL_disc3 | ACCATGGACA | TGTCCATGGT |
| ALX1_RAX_1_SELEX\|RAX_2 | GCCAATTAAC | GTTAATTGGC |
| SPIC_SPIC_1_SELEX\|SPIC_1 | AAAAAGAGGAAGTA | TACTTCCTCTTTTT |
| RORB_pTH3469_PBM | GGTGACCTA | TAGGTCACC |
| EMX2_ems_FlyReg_FBgn0000576_B1H | TGTCATAA | TTATGACA |
| SP1_disc2 | AAAGGGGC | GCCCCTTT |
| E2F7 _E2F7_f1_HocoMoco | AAAGGCGCGAAAA | TTTTCGCGCCTTT |
| FOXD1_MA0032.1_SELEX\|FOXC1_2 | GGTAAGTA | TACTTACC |
| TCF4_Tcfe2a_3865_PBM | GCACCTGC | GCAGGTGC |
| HINFP_HINFP_f1_HocoMoco | GCGCTAGCGGACGTTA | TAACGTCCGCTAGCGC |
| EGR3_Egr1_1_SELEX\|EGR1_known12 | AATTGAGTGGGCGTAG | CTACGCCCACTCAATT |
| POU1F1_2 | AATTCATAATTATACAC | TGTGTATAATTATGAAT |
| | A | T |
| SPI1_known3 | TAACTTCCTCTTAA | TTAAGAGGAAGTTA |
| MIXL1_MIXL1_1_SELEX\|MIXL1_1 | GTTAATTAGA | TCTAATTAAC |
| GCM1_GCM1_f1_HocoMoco | AATACCCGCATGTG | CACATGCGGGTATT |
| HLTF_HLTF_f1_HocoMoco | TAGGGCTGCAAA | TTTGCAGCCCTA |
| SMAD3_2 | CAAATCCAGACATCAGA | TCTGATGTCTGGATTTG |
| SPIC_SPI1_si_HocoMoco | AAAAAGAGGAAGTGAA | TTTCACTTCCTCTTTTT |
| | A | |
| POU6F1_2 | GACGATAATGAGGTTGC | GCAACCTCATTATCGTC |
| NR2C2_HepG2b_TR4_UCD_ChIP-seq | AACCGCTTCCGGGTC | GACCCGGAAGCGGTT |
| PRDM4_PRDM4_1_SELEX\|PRDM4_1 | GGGGGCCTTGAAA | TTTCAAGGCCCCC |
| NEUROG1_NEUROD2_1_SELEX\|NEUROD2_1 | ACCATATGGC | GCCATATGGT |
| HOXC5_Hoxa5_3415_PBM\|MEOX2_Meox1_2310_PBM\|H | GGTAATTAA | TTAATTACC |
| OXA4_Gsh2_3990_PBM\|HOXC5_Hoxa7_3750_PBM\|VAX1 | | |
| _Vax1_3499_PBM\|HOXB2_Hoxa1_3425_PBM\|HOXC5_Ho | | |
| xa6_1040_PBM\|HOXC5_Hoxa4_3426_PBM | | |
| MYC_known13 | AACCACGTGCTC | GAGCACGTGGTT |
| POU5F1_PP5F1_do_HocoMoco | ATTTGCATAACAAAGG | CCTTTGTTATGCAAAT |
| MYBL1_V$CMYB_01_Transfac\|MYB_1 | CCCAACGGCGGTTGGG | CCCCCAACCGCCGTTGG |
| | GG | G |
| HOXC10_1 | ACGTTTTACGACTTTA | TAAAGTCGTAAAACGT |
| HOXC10_HXD10_a_HocoMoco | AATTAAAGCA | TGCTTTAATT |
| SHOX_Hbn_SOLEXA_FBgn0008636_B1H\|HOXC5_Pb_Cell_F | GTTAATTA | TAATTAAC |
| Bgn0051481_B1H\|EMX2_E5_Cell_FBgn0008646_B1H\|UNC | | |
| X_Odsh_SOLEXA_FBgn0026058_B1H\|EVX2_Eve_SOLEXA_F | | |
| Bgn0000606_B1H\|ALX1_CG33980_SOLEXA_FBgn0053980_ | | |
| B1H\|LBX2_Lbl_SOLEXA_FBgn0008651_B1H\|EN2_En_Cell_ | | |
| FBgn0000577_B1H\|TLX3_C15_Cell_FBgn0004863_B1H | | |
| BHLHA15_BHLHA15_1_SELEX\|MSC_pTH5112_PBM\|OLIG2 | ACCATATGGT | ACCATATGGT |
| _OLIG2_2_SELEX\|NEUROG1_pTH5270_PBM\|BHLHA15_1\| | | |
| OLIG2_2 | | |
| SRF_MA0083.2_ChIP-seq | CATGCCCAAATAAGGCA | TTGCCTTATTTGGGCAT |
| | A | G |
| TFCP2_TFCP2_2_SELEX\|TFCP2_5 | ACCGGTTTAAACCGGT | ACCGGTTTAAACCGGT |
| IRX4_1 | AATATACATGTAAAACA | TGTTTTACATGTATATT |
| RUNX_1 | AAGTCTGTGGTTAGC | GCTAACCACAGACTT |
| CREB3_1 | CGATGACGTCATCA | TGATGACGTCATCG |
| FOXO3_2 | AATTTGTTTACA | TGTAAACAAATT |
| FOSL1_K562_FOSL1_HudsonAlpha_ChIP-seq | ATGAGTCACCC | GGGTGACTCAT |
| PAX2_V$PAX2_02_Transfac\|PAX2_2 | AATAAACTC | GAGTTTATT |
| IRF_disc1\|E2F_disc4 | CAGCCAATCA | TGATTGGCTG |
| PRDM1_known1 | AGGAAGGGAAAGGA | TCCTTTCCCTTCCT |
| EGR3_MA0162.2_ChIP-seq | CCCCCGCCCCCGCC | GGCGGGGGCGGGGG |
| MEF2B_GM12878_MEF2A_HudsonAlpha_ChIP-seq | ATGCCAAAAATAGAA | TTCTATTTTTGGCAT |
| GFI1B_sens-2_SANGER_2.5_FBgn0051632_B1H | ATAAATCACAGCACTC | GAGTGCTGTGATTTAT |
| GFI1B_V$GFI1_01_Transfac | ACAAAATAAATCACAGC | GGCATATGCTGTGATTT |
| | ATATGCC | ATTTTGT |
| NR3C1_disc2\|TFAP2_disc1 | GGTGAGTCAC | GTGACTCACC |
| TP63_MA0525.1_ChIP-seq | AGACATGCCCAGACATG | GGGCATGTCTGGGCAT |
| | CCC | GTCT |
| GFI1B_GFI1B_f1_HocoMoco | AAATCACTGCA | TGCAGTGATTT |
| ITGB2_1 | CTGACCCC | GGGGTCAG |
| ETV5_GABPA_f1_HocoMoco | CCACTTCCGGTTC | GAACCGGAAGTGG |
| CPHX_1 | ATGATCGAATCAAA | TTTGATTCGATCAT |
| MBD2_MBD2_si_HocoMoco | CCTCCGGCCCG | CGGGCCGGAGG |
| HMGA2_pTH8863_PBM | CAAATATTTG | CAAATATTTG |
| SOX15_1 | AAATCTATTGTTCACTA | TAGTGAACAATAGATTT |
| CTCF_ProgFib_CTCF_UT-A_ChIP- | CGCCCCCTGGTGGCC | GGCCACCAGGGGGCG |
| seq\|CTCF_GM12878_CTCF_Stanford_ChIP-seq\|CTCF_SK- | | |
| N-SH_RA_UW_ChIP-seq\|CTCF_HCFaa_CTCF_UW_ChIP-seq | | |
| TBX1_TBX20_4_SELEX\|TBX20_4 | CTTCACACCTA | TAGGTGTGAAG |
| EN2_MA0027.1_SELEX\|EN1_2 | AAGTAGTGCCC | GGGCACTACTT |
| EGR1_disc1 | CCGCCCCCGC | GCGGGGGCGG |
| GLIS2_Glis2_1757_PBM | AGACCCCCCAC | GTGGGGGGTCT |
| REST_known2 | GGCGCTCTCCGTGGTGC | TTCAGCACCACGGAGAG |
| | TGAA | CGCC |
| HMG20B_pTH8555_PBM | ATATATAATAA | TTATTATATAT |
| SOX11_1 | ATAAGAACAAAGGACTA | TAGTCCTTTGTTCTTAT |
| MAFA_V$VMAF_01_Transfac | AAATGCTGACTCAGCAC | TTGTGCTGAGTCAGCAT |
| | AA | TT |
| HAND2_HAND1_si_HocoMoco | AATGCCAGACCC | GGGTCTGGCATT |
| RREB1_RREB1_si_HocoMoco | ACCCCAAACCACCCCCC | GGGGGGGGGGGTGGTT |
| | CCCCC | TGGGGT |
| PAX4_V$PAX4_02_Transfac\|PAX4_2 | GAATAATTACC | GGTAATTATTC |
| SCRT2_CG12605_SOLEXA_5_FBgn0035481_B1H\|SCRT2_sc | CCACCTGTTGCAC | GTGCAACAGGTGG |
| rt_SOLEXA_2.5_1_FBgn0004880_B1H | | |
| HOXB13_pTH5808_PBM | GCCCATAAAA | TTTTATGGGC |
| SRY_SRY_2_SELEX\|SRY_6 | AACAATATTCATTGTT | AACAATGAATATTGTT |
| RORA_3 | TAAATAGGTCA | TGACCTATTTA |
| MAFK_MAFF_1_SELEX\|MAFF_1 | TTGCTGACTCAGCAA | TTGCTGAGTCAGCAA |
| RARG_RARG_do_HocoMoco | GGGGGTCACCCAGAGG | GTGACCTCTGGGTGACC |
| | TCAC | CCC |
| SPDEF_Ets98B_SANGER_10_FBgn0005659_B1H | ACCCGGATC | GATCCGGGT |
| E2F_disc7 | CCGCGCCGCC | GGCGGCGCGG |
| NR3C1_known8 | GTTGCGGGTACAGAGT | TTCCCTAGAACACTCTGT |
| | GTTCTAGGGAA | ACCCGCAAC |
| TCF12_disc3 | AGGTGCGG | CCGCACCT |
| GATA_disc1 | CCTTATCTGC | GCAGATAAGG |
| THRB_THA_f1_HocoMoco | CTGACCTGAA | TTCAGGTCAG |
| GSC_1 | AATCGTTAATCCCTTTA | TAAAGGGATTAACGATT |
| PAX5_disc5 | GCGCGCGCGC | GCGCGCGCGC |
| NKX2-5_MA0211.1_B1H | CACTTAA | TTAAGTG |
| NR4A2_NR4A2_2_SELEX\|NR4A_known3 | TGACCTTTAAAGGTCA | TGACCTTTAAAGGTCA |
| FOXD1_V$XFD1_01_Transfac | CATGTAAATAATGC | GCATTATTTACATG |
| FOXD1_FOXC2_3_SELEX\|FOXC2_3 | TAAGTAAACAAA | TTTGTTTACTTA |
| IRX3_1 | AAAATACATGTAATACT | AGTATTACATGTATTTT |
| NOBOX_NOBOX_si_HocoMoco\|BARHL2_Barhl2_3868_PB | ACCAATTAG | CTAATTGGT |
| M\|BARHL2_Barhl1_2590_PBM | | |
| SOX17_Sox17_1_SELEX\|SOX17_4 | AACAATGCAATTGTT | AACAATTGCATTGTT |
| PKNOX2_Pknox1_2364_PBM | ACCTGTCA | TGACAGGT |
| E2F4_E2F4_2_SELEX\|E2F1_E2F1_2_SELEX\|E2F_known28\| | TTTGGCGCCAAA | TTTGGCGCCAAA |
| E2F_known30 | | |
| SNAI3_SNAI1_f1_HocoMoco | CCACCTGG | CCAGGTGG |
| SREBF2_MA0595.1_ChIP-seq | ATCACCCCAC | GTGGGGTGAT |
| NR2E1_NR2E1_2_SELEX\|NR2E1_Nr2e1_2_SELEX\|NR2E1_2 | AAGTCAATAAGTCA | TGACTTATTGACTT |
| \|NR2E1_4 | | |
| CDX2_CDX2_f1_HocoMoco | ATTTATGG | CCATAAAT |
| ALX1_MA0180.1_B1H\|ALX1_CG33980_SOLEXA_2_10_FBg | CTAATTAAA | TTTAATTAG |
| n0053980_B1H\|ALX1_CG33980_Cell_FBgn0053980_B1H | | |
| BCL11B_GM12878_BCL11A_HudsonAlpha_ChIP-seq | AAGAGGAAGTGAAAC | GTTTCACTTCCTCTT |
| TGIF2_1 | AACTAGCTGTCAATAC | GTATTGACAGCTAGTT |
| SREBF2_MA0596.1_ChIP-seq | ATCACCCCAT | ATGGGGTGAT |
| ARID3C_pTH4425_PBM | ATATTAATTAA | TTAATTAATAT |
| EGR1_disc7 | CACGCACGCA | TGCGTGCGTG |
| EN2_inv_SOLEXA_5_FBgn0001269_B1H | CTAATTAAG | CTTAATTAG |
| IRX3_Irx4_2242_PBM | AATTACAA | TTGTAATT |
| NKX2- | CAATTAAG | CTTAATTG |
| 5_V$NKX25_02_Transfac\|ISL2_Tup_Cell_FBgn0003896_B1 | | |
| H\|NKX2-5_2 | | |
| MAX_H1-hESC_MAX_UCD_ChIP-seq | AGAGCACGTGG | CCACGTGCTCT |
| ARID3C_pTH5118_PBM | CAATTAAA | TTTAATTG |
| CRX_1 | GTGGGATTAGTGA | TCACTAATCCCAC |
| GSC_GSC_1_SELEX\|GSC_2 | GCTAATCCCC | GGGGATTAGC |
| COMP1_1 | GGCCTTTTGTTGTCAATC | TGTTTTGATTGACAACA |
| | AAAACA | AAAGGCC |
| ETS1_ETS1_si_HocoMoco | ACAGGAAGT | ACTTCCTGT |
| RFX5_known4 | CTGTTGCCA | TGGCAACAG |
| DLX1_pTH5506_PBM | AGTAATTAGC | GCTAATTACT |
| KIAA0415_YNL068C_830_DeBoer11 | TCATCTTTGTTTACTTTT | TTAAAAGTAAACAAAGA |
| | AA | TGA |
| ZBTB33_KAISO_f1_HocoMoco | CTCGCAGGAAGA | TCTTCCTGCGAG |
| T_TBX19_1_SELEX\|TBX19_1 | TTTCACACCTAGGTGTG | TTTCACACCTAGGTGTG |
| | AAA | AAA |
| NEUROG1_NDF1_f1_HocoMoco | CGGCAGATGGCC | GGCCATCTGCCG |
| SP9_pTH5576_PBM | ACCGCTTC | GAAGCGGT |
| MYOD1_MA0500.1_ChIP-seq | CTGCAGCTGTC | GACAGCTGCAG |
| RORB_V$RORA1_01_Transfac\|RORA_1 | ATATCAAGGTCAT | ATGACCTTGATAT |
| RAD21_disc7 | GCCAGCAGCTGGCGC | GCGCCAGCTGCTGGC |
| POU3F3_V$BRN2_01_Transfac | GCTCATTACGAATGAC | GTCATTCGTAATGAGC |
| HNF4_known4 | ATGAACTTTGACC | GGTCAAAGTTCAT |
| PRDM1_Mv110_ChIP-seq | ACTTTCAC | GTGAAAGT |
| CTCF_CTCF_1_SELEX\|CTCF_known2 | AGCGCCACCTAGTGGTA | TACCACTAGGTGGCGCT |
| BPTF_V$FAC1_01_Transfac | ACCCACAACACATA | TATGTGTTGTGGGT |
| NFE2_NFE2_1_SELEX\|NFE2_known2 | CATGACTCATC | GATGAGTCATG |
| HNF4_known3 | GGGGGCAAAGGTCAC | GTGACCTTTGCCCCC |
| HIF1A_2 | GCGTACGTGCGGCA | TGCCGCACGTACGC |
| BDP1_disc1 | CCCGGAGGGCTTCCTGG | CCTCCTCCAGGAAGCCC |
| | AGGAGG | TCCGGG |
| PAX6_MA0069.1_SELEX\|PAX6_3 | AACTCATGCGTGAA | TTCACGCATGAGTT |
| FOXJ3_1 | AAAAAGTAAACAAACCC | GGGTTTGTTTACTTTTT |
| AP1_disc1 | ATGACGTCAC | GTGACGTCAT |
| NPAS3_HIF1A_si_HocoMoco | CCGCACGTACGC | GCGTACGTGCGG |
| CTCF_N H-A_CTCF_Broad_ChIP-seq | TAGTGCCCCCTAGTGGC | TTTGGCCACTAGGGGGC |
| | CAAA | ACTA |
| ATF3_known12 | GCGCTGACGTAACC | GGTTACGTCAGCGC |
| MEF2B_V$MEF2_04_Transfac\|MEF2_known5 | ACTGTTACTAAAAATAG | AGTTTCTATTTTTAGTAA |
| | AAACT | CAGT |
| SOX7_SOX7_2_SELEX\|SOX7_3 | AAACAATGCAATTGTTT | AAACAATTGCATTGTTT |
| NFIA_NFIA_2_SELEX | ACTTGGCACC | GGTGCCAAGT |
| TATA_disc2 | ATGACGTCAT | ATGACGTCAT |
| OVOL1_ovo_SANGER_5_FBgn0003028_B1H | AGTACCGTTAT | ATAACGGTACT |
| ZIC5_Opa_SANGER_5_FBgn0003002_B1H | ATCCCCCCCACCG | CGGTGGGGGGGAT |
| ENSG00000250096_RUNX2_3_SELEX\|RUNX2_6 | AAACCGCAA | TTGCGGTTT |
| CUX1_7 | TAATGATGATCACTA | TAGTGATCATCATTA |
| YY1_disc5 | CTCCCCTGCCGC | GCGGCAGGGGAG |
| BATF3_BATF3_1_SELEX\|BATF_known1 | TGATGACGTCATCA | TGATGACGTCATCA |
| EBF1_disc2 | CAGCTCCCCAGGG | CCCTGGGGAGCTG |
| ZNF75C_ZNF75A_1_SELEX\|ZNF75A_1 | GCTTTTCCCACA | TGTGGGAAAAGC |
| CHD2_disc3 | CTCCTCGCCCC | GGGGCGAGGAG |
| OSR2_sob_SANGER_10_FBgn0004892_B1H | GAAACACAGTAGC | GCTACTGTGTTTC |
| NFAT5_pTH9263_PBM\|NFATC1_pTH8401_PBM\|NFATC1_ | AATGGAAAAT | ATTTTCCATT |
| pTH8315_PBM\|NFATC1_pTH9196_PBM\|NFATC1_pTH855 | | |
| 7_PBM\|NFATC1_pTH9005_PBM\|NFATC1_pTH9192_PBM | | |
| SIX5_known 7 | AATAGGGTATCAATATT | AATATTGATACCCTATT |
| NKX3-1_4 | CATTTAAGTACTTAGTA | TACTAAGTACTTAAATG |
| MSC_MSC_1_SELEX\|ASCL2_Ascl2_2654_PBM\|MYOD1_MY | AACAGCTGTT | AACAGCTGTT |
| F6_1_SELEX\|MYF6_2\|MSC_1 | | |
| FOXP3_FOXP3_f1_HocoMoco | AAACAAATT | AATTTGTTT |
| STAT_known17 | CATTTCCCGGAAACC | GGTTTCCGGGAAATG |
| AR_ANDR_do_HocoMoco | AAGAACATCCTGTTCC | GGAACAGGATGTTCTT |
| E2F2_E2F2_1_SELEX\|E2F3_E2F3_1_SELEX\|E2F2_2\|E2F_kn | AAAAATGGCGCCAAAAT | CATTTTGGCGCCATTTTT |
| own24 | G | |
| USF1_V$USF_02_Transfac\|MYC_known4 | AAATCACGTGATAT | ATATCACGTGATTT |
| PITX1_1 | ATTGTTAATCCCTCTAA | TTAGAGGGATTAACAAT |
| KLF4_pTH3086_PBM\|KLF4_Klf7_0974_PBM\|KLF4_pTH097 | GCCACGCCCA | TGGGCGTGGC |
| 7_PBM | | |
| RHOXF1_7 | CGCTGTTAA | TTAACAGCG |
| LMX1A_MA0182.1_B1H | CAATAAA | TTTATTG |
| PTF1A_PTF1A_f1_HocoMoco | CAGGAAACTGAACAGCT | GGACAGCTGTTCAGTTT |
| | GTCC | CCTG |
| FOXD1_V$XFD2_01_Transfac | AATATAAACATACA | TGTATGTTTATATT |
| NANOG_known1 | GGAAATGGGCCC | GGGCCCATTTCC |
| SOX9_SOX9_5_SELEX\|SOX9_7 | AAACAATTGCAGTGTTT | AAACACTGCAATTGTTT |
| CUX1_6 | ACCGGTTGATCACCTGA | TCAGGTGATCAACCGGT |
| YY1_known4 | CAAGATGGC | GCCATCTTG |
| ATF1_pTH5002_PBM | TATGACGTAA | TTACGTCATA |
| UBP1_MA0145.2_ChIP-seq\|TFCP2L1_1 | CCAGTTCAAACCAG | CTGGTTTGAACTGG |
| MEF2_known10 | GGCTATTTTTAA | TTAAAAATAGCC |
| IKZF1_V$IK2_01_Transfac\|IKZF2_1 | GTATTCCCAAAC | GTTTGGGAATAC |
| NANOG_disc2 | GCCTTTGTTTTGCAA | TTGCAAAACAAAGGC |
| BACH1_V$BACH1_01_Transfac\|BACH1_1 | ACGATGAGTCATGCT | AGCATGACTCATCGT |
| GATA2_V$GATA2_01_Transfac\|GATA_known2 | CGCTATCCGC | GCGGATAGCG |
| MZF1_V$MZF1_02_Transfac\|MZF1_2 | GGGTGAGGGGGAA | TTCCCCCTCACCC |
| OSR2_Osr1_3033_PBM\|OSR2_pTH9150_PBM | ACGGTAGCA | TGCTACCGT |
| RFX8_pTH9285_PBM | CATAGCAAC | GTTGCTATG |
| ENSG00000250096_RUNX3_si_HocoMoco | AACCACAAACCCCA | TGGGGTTTGTGGTT |
| RORB_pTH3464_PBM | CTAGGTCA | TGACCTAG |
| POU2F2_known4 | ATATAATTATGCAAATT | TCTTTTAATTTGCATAAT |
| | AAAAGA | TATAT |
| ATF5_ATF5_si_HocoMoco | CCTTCTTCCTTA | TAAGGAAGAAGG |
| ETV5_ELK3_f1_HocoMoco | CCCAGGAAGTGC | GCACTTCCTGGG |
| MYC_known18\|MYCN_2 | CGCACGTGGC | GCCACGTGCG |
| ZIC4_Zic3_1_SELEX\|ZIC4_ZIC4_1_SELEX\|ZIC4_1\|ZIC3_4 | GACCCCCCGCTGTGC | GCACAGCGGGGGGTC |
| CTCF_HMEC_CTCF_Broad_ChIP-seq | ATAGCGCCCCCTGGTGG | TGGCCACCAGGGGGCG |
| | CCA | CTAT |
| USF1_K562_USF1_HudsonAlpha_ChIP-seq | CGGCCACGTGACCC | GGGTCACGTGGCCG |
| PITX3_1 | AGGGGGATTAGCTGCC | GGCAGCTAATCCCCCT |
| LBX1_pTH5994_PBM\|SHOX_UNCX_2_SELEX\|LBX1_pTH567 | CTAATTAA | TTAATTAG |
| 2_PBM\|ALX1_pTH6195_PBM\|DMBX1_Cart1_0997_PBM\| | | |
| HOXC5_pTH6140_PBM\|DRGX_Pax6_3838_PBM\|DMBX1_ | | |
| Arx_1738_PBM\|LMX1A_LMX16_2_SELEX\|VENTX_pTH549 | | |
| 0_PBM\|POU3F3_pTH9342_PBM\|LBX2_Lbx2_3869_PBM\|E | | |
| VX2_pTH6104_PBM\|ALX1_PRRX1_1_SELEX\|SHOX_Prrx2_1 | | |
| _SELEX\|LHX9_Lhx2_0953_PBM\|HESX1_pTH6156_PBM\|HO | | |
| XD1_pTH6251_PBM\|LHX9_Lhx9_3492_PBM\|LBX2_pTH64 | | |
| 04_PBM\|SHOX_SHOX_1_SELEX\|SHOX_Shox2_1_SELEX\|SH | | |
| OX_Uncx_2_SELEX\|ALX1_ISX_3_SELEX\|ISX_4\|LMX16_3\|N | | |
| KX6-2_2\|NKX6- | | |
| 2_3\|PRRX1_2\|PRRX2_5\|SHOX_1\|SHOX2_3\|UNCX_3\|UNC | | |
| X_5 | | |
| HOXC5_PDX1_2_SELEX\|VAX1_VAX1_1_SELEX\|HOXC5_pTH | CTAATTAC | GTAATTAG |
| 6215_PBM\|VAX1_VAX2_1_SELEX\|PDX1_6\|VAX1_2\|VAX2_ | | |
| 2 | | |
| PAX4_PAX4_2_SELEX\|ALX1_VSX2_1_SELEX\|PAX4_PAX4_1 | CTAATTAG | CTAATTAG |
| _SELEX\|EN2_EN1_3_SELEX\|LHX8_Lhx8_2_SELEX\|PAX4_7\| | | |
| PAX4_8\|EN1_6\|LHX8_3\|VSX2_2 | | |
| RHOXF2_1 | GAGCATTAATTAAGGCA | TGCCTTAATTAATGCTC |
| MYC_known11 | GACCACGTGACA | TGTCACGTGGTC |
| ZIC4_Zic3_3119_PBM\|ZIC4_Zic2_2895_PBM\|ZIC4_Zic1_09 | CACAGCGGGG | CCCCGCTGTG |
| 91_PBM | | |
| ETV5_K562_ETS1_HudsonAlpha_ChIP-seq | CCTGCTGGGAGTTGTAG | GGGACTACAACTCCCAG |
| | TCCC | CAGG |
| FOXD1_Foxk1_1_SELEX\|FOXK1_3 | CGGACACAATC | GATTGTGTCCG |
| AL662830.5_exd_SOLEXA_2_FBgn0000611_B1H | ATATCAAA | TTTGATAT |
| CREB3L2_pTH5024_PBM | ACACGTGGC | GCCACGTGT |
| GATA2_Mf28_ChIP-seq | ACCCCCTTATCAGACTAT | ATAGTCTGATAAGGGG |
| | | GT |
| TEF_DBP_si_HocoMoco | GTTATGTAACA | TGTTACATAAC |
| ENSG00000234254_Tgif2_3451_PBM\|PKNOX2_Pknox2_30 | ACCTGTCAAT | ATTGACAGGT |
| 77_PBM | | |
| AL662834.13_Zbtb12_2932_PBM | ATCTAGAACA | TGTTCTAGAT |
| SRY_4 | GAATATTATAATTATA | TATAATTATAATATTC |
| DMBX1_Alx1_1_SELEX\|DMBX1_ALX3_2_SELEX\|ALX3_3\|AL | TCTAATTAAA | TTTAATTAGA |
| X1_4 | | |
| DLX1_Dlx2_1_SELEX\|DLX2_3 | GCAATTAA | TTAATTGC |
| YY2_pho_SANGER_10_FBgn0002521_B1H | CAAAATGGCGGC | GCCGCCATTTTG |
| TFAP2A_Tcfap2a_2337_PBM | CCCTGAGGCA | TGCCTCAGGG |
| CR936877.3_RXRB_f1_HocoMoco | TGAGGTCACA | TGTGACCTCA |
| RBPJ_MA0085.1_COMPILED | ATCTCGTTTCCCACAG | CTGTGGGAAACGAGAT |
| ETV5_HepG2_GABP_HudsonAlpha_ChIP-seq | CCACTTCCGGTTCCG | CGGAACCGGAAGTGG |
| NKX2-5_Bap_Cell_FBgn0004862_B1H | CCACTTAAGA | TCTTAAGTGG |
| CUX1_CUX1_1_SELEX\|CUX1_8 | ATCGATAACTGATCGAT | ATCGATCAGTTATCGAT |
| DMBX1_ALX4_1_SELEX\|DMBX1_Alx1_2_SELEX\|DMBX1_Ar | CTAATTAAATTAA | TTAATTTAATTAG |
| x_1_SELEX\|SHOX_Uncx_1_SELEX\|ALX4_3\|ALX1_5\|ARX_3\| | | |
| UNCX_4 | | |
| RELA_GM12892_N FKB_Stanford_ChIP- | AGGGGATTTCCAAGG | CCTTGGAAATCCCCT |
| seq\|RELA_GM19193_NFKB_Stanford_ChIP-seq | | |
| HNF4_known1 | ACAGGGTCAAAGGTCA | TCTTGACCTTTGACCCTG |
| | AGA | T |
| SHOX_UNCX_1_SELEX\|UNCX_2 | CTAATTAAATTAG | CTAATTTAATTAG |
| NKX2-6_Tin_SOLEXA_FBgn0004110_B1H\|NKX2- | CACTTAAG | CTTAAGTG |
| 5_Bap_SOLEXA_FBgn0004862_B1H | | |
| CDX2_cad_FlyReg_FBgn0000251_B1H | ATCATAAAA | TTTTATGAT |
| BCL_disc10 | CCTCCGCCGC | GCGGCGGAGG |
| SIX5_known 1 | AATAGGGTATCATATAT | ATATATGATACCCTATT |
| HOXC5_1 | AGTAATTAATTAATTCG | CGAATTAATTAATTACT |
| ZNF423_ZN423_a_HocoMoco | GCACCCTTGGGTGCC | GGCACCCAAGGGTGC |
| REST_disc3 | GGACAGCGCC | GGCGCTGTCC |
| IRF7_IRF7_2_SELEX\|IRF_known18 | AAAACGAAAATCGATTT | AAATCGATTTTCGTTTT |
| THRB_V$T3R_01_Transfac | GATTGAGGTCACGCCA | TGGCGTGACCTCAATC |
| POU3F3_pTH3819_PBM\|ALX1_Vsx1_1728_PBM | CTAATTATC | GATAATTAG |
| SREBP_known2 | GATCACCCCAC | GTGGGGTGATC |
| MLX_pTH2882_PBM | CACGTGATC | GATCACGTG |
| ZNF32_pTH3120_PBM | ATATATATA | TATATATAT |
| PAX9_sv_SOLEXA_5_FBgn0005561_B1H | ATTGGTGCGTGACGG | CCGTCACGCACCAAT |
| RELA_MA0101.1_SELEX\|RELA_V$CREL_01_Transfac\|REL1 | GGAAATCCCC | GGGGATTTCC |
| \|REL2 | | |
| CTCF_A549_CTCF_HudsonAlpha_ChIP-seq | ACAGCGCCCCCTGGTGG | GTGGCCACCAGGGGGC |
| | CCAC | GCTGT |
| CR936877.3_MA0512.1_ChIP-seq | CAAAGGTCAGA | TCTGACCTTTG |
| THAP1_disc1 | CCGCCATCTTGGTTAAG | CCTCTGCCCTTAACCAA |
| | GGCAGAGG | GATGGCGG |
| IRF7_IRF7_1_SELEX\|IRF_known17 | ACGAAAGCGAAAGT | ACTTTCGCTTTCGT |
| SP9_Sp4_1011_PBM | AGGGGGCGGG | CCCGCCCCCT |
| BX088580.2_H1-hESC_POU5F1_HudsonAlpha_ChIP-seq | ATTTGCATAACAAAGGA | TCCTTTGTTATGCAAAT |
| HOXC10_HOXC10_1_SELEX\|HOXC10_2 | CCCATAAAAA | TTTTTATGGG |
| HBP1_Hbp1_2241_PBM | GTGAATGA | TCATTCAC |
| ATF1_pTH5005_PBM | ATGACGTA | TACGTCAT |
| RFX8_pTH10021_PBM | CATAGCAACC | GGTTGCTATG |
| PAX4_V$PAX4_04_Transfac\|PAX4_4 | AAAAATTAACCCAAAAT | GGGGTGAGGTTGGATT |
| | CCAACCTCACCCC | TTGGGTTAATTTTT |
| RFX8_Rfxdc2_3516_PBM | CATAGCAACG | CGTTGCTATG |
| GLIS3_GLIS3_f1_HocoMoco | GTGGGGGGTA | TACCCCCCAC |
| PAX5_disc4 | AGAGGAAGTG | CACTTCCTCT |
| TEAD1_TEAD1_2_SELEX\|TEAD1_4 | ACATTCCTGACATTCCA | TGGAATGTCAGGAATGT |
| E2F_known17 | GTTTGGCGCGA | TCGCGCCAAAC |
| ZNF274_NT2-D1_ZNF274_UCD_ChIP-seq | TCATACTGGAGAGAA | TTCTCTCCAGTATGA |
| TFAP2A_Tcfap2a_2_SELEX\|TFAP2A_TFAP2A_2_SELEX\|TFA | CGCCTCAGGCA | TGCCTGAGGCG |
| P2_known12\|TFAP2_known21 | | |
| OVOL1_OVOL1_f1_HocoMoco | ACAGTTACA | TGTAACTGT |
| ESRRG_Esrra_2190_PBM | ATGACCTTG | CAAGGTCAT |
| PAX4_3 | AATCCCCACCCC | GGGGTGGGGATT |
| IRF1_IRF1_si_HocoMoco | ACTTTCACTTTC | GAAAGTGAAAGT |
| POU2F2_known1 | ATCAATATGCAAATTTC | CCGAAATTTGCATATTG |
| | GG | AT |
| PAX4_V$PAX4_03_Transfac | AATCCCCACCCG | CGGGTGGGGATT |
| POU3F3_V$OCT1_02_Transfac\|POU2F2_known2 | ATGAATATGCATATA | TATATGCATATTCAT |
| ARHGEF12_1 | ATTTACGACAAATAGC | GCTATTTGTCGTAAAT |
| EOMES_TBX21_3_SELEX\|TBX21_3 | TCACACCTTAAAGGTGT | TCACACCTTTAAGGTGT |
| | GA | GA |
| MAX_MAX_1_SELEX\|MYC_known20 | CACGTGCTAACCACGTG | CACGTGGTTAGCACGTG |
| HSFY1_HSFY2_3_SELEX\|HSFY2_3 | TTCGAACCGTTCGAA | TTCGAACGGTTCGAA |
| CEBPA_HeLa-S3_CEBPB_Stanford_ChIP-seq | AGGATTGTGCAATA | TATTGCACAATCCT |
| RFX8_pTH8587_PBM | ATAGCAAC | GTTGCTAT |
| CEBPA_pTH3208_PBM | ATTACGCAAT | ATTGCGTAAT |
| FOXM1_pTH8652_PBM | AAAAACAA | TTGTTTTT |
| PDX1_1 | GAATTAATGACC | GGTCATTAATTC |
| E2F1_MA0024.2_ChIP-seq | CCTCCCGCCCG | CGGGCGGGAGG |
| ALX1_ISX_1_SELEX\|ISX_2 | TTAATCTAATTAA | TTAATTAGATTAA |
| TWIST2_pTH5033_PBM\|OLIG2_OLIG3_1_SELEX\|OLIG2_pT | AACATATGGT | ACCATATGTT |
| H5267_PBM\|OLIG2_BHLHE23_1_SELEX\|OLIG2_OLIG2_1_S | | |
| ELEX\|BHLHE23_1\|OLIG2_1\|OLIG3_1 | | |
| GFI1B_sens_SOLEXA_5_FBgn0002573_B1H | AAATAAATCACAGCA | TGCTGTGATTTATTT |
| FOXN1_1 | AAAGCGTCGTT | AACGACGCTTT |
| SHOX_PHOX2A_1_SELEX\|PROP1_PROP1_1_SELEX\|SHOX_P | TAATTAAATTA | TAATTTAATTA |
| HOX26_2_SELEX\|SHOX_PHOX26_1_SELEX\|PHOX2A_2\|PH | | |
| OX26_2\|PHOX26_3\|PROP1_2 | | |
| POU2F2_known11\|POU2F2_known12 | TATGCAAATCA | TGATTTGCATA |
| ATOH7_pTH5074_PBM | AACATATGGC | GCCATATGTT |
| FOXD1_MA0546.1_ChIP-seq | AAAGTAAACA | TGTTTACTTT |
| NR2E1_pTH6281_PBM | AGAGGTCAAT | ATTGACCTCT |
| AHR_AHR_si_HocoMoco | GCACGCAAC | GTTGCGTGC |
| GATA2_V$GATA1_02_Transfac\|GATA_known4 | GTAAAGATAGGGGA | TCCCCTATCTTTAC |
| AP1_known3 | ACTGAGTCATC | GATGACTCAGT |
| STAT1_V$STAT1_03_Transfac | CGGAAATC | GATTTCCG |
| HDAC2_disc6 | AAGAAAAGAAAAAAA | TTTTTTTCTTTTCTT |
| SIN3A_disc7 | CCCCGGACAGCGCC | GGCGCTGTCCGGGG |
| TEF_V$HLF_01_Transfac\|TEF_V$VBP_01_Transfac\|HLF_I | ATTACGTAAC | GTTACGTAAT |
| ZEB1_GM12878_ZEB1_HudsonAlpha_ChIP-seq\|ZEB1_disc1 | CAGGTGAG | CTCACCTG |
| KLF4_KLF3_f1_HocoMoco | AGCCACACCCAGGCA | TGCCTGGGTGTGGCT |
| EP300_disc1\|RXRA_disc3 | AATGAGTCAT | ATGACTCATT |
| HNFIA_HNF1B_1_SELEX\|HNF1B_3 | GTTAATCATTAAC | GTTAATGATTAAC |
| LMX1A_CG32105_Cell_FBgn0052105_B1H | ATTAATTAG | CTAATTAAT |
| RBPJ_1 | CGTGGGAA | TTCCCACG |
| NKX6-3_Nkx6-1_2825_PBM\|N KX6-3_N kx6-3_3446_PBM | ATTAATTAC | GTAATTAAT |
| OSR2_sob_SOLEXA_5_FBgn0004892_B1H | AAAAACAGTAGCCG | CGGCTACTGTTTTT |
| FOXP4_CG2052_SOLEXA_2.5_FBgn0039905_B1H | AAAAAAAAAAAAACC | GGTTTTTTTTTTTTT |
| TCF12_disc5 | CCAGCTGCCCC | GGGGCAGCTGG |
| USF1_V$USF_C_Transfac\|MYC_known7 | CCACGTGC | GCACGTGG |
| BDP1_disc3 | CCCACAGCCTCGTC | GACGAGGCTGTGGG |
| THRB_THA_f2_HocoMoco | CTGACCTGAAGTGACCC | GGGTCACTTCAGGTCAG |
| AR_V$GR_Q6_Transfac\|NR3C1_known1 | CTAGAACACAGTGTACC | TGGGTACACTGTGTTCT |
| | CA | AG |
| TEAD3_TEAD3_2_SELEX\|TEAD3_2 | ACATTCCA | TGGAATGT |
| SREBF2_pTH4327_PBM | TCACGCGA | TCGCGTGA |
| MAFK_MAFK_4_SELEX\|MAF_known9 | ATGCTGAGTCAGCGA | TCGCTGACTCAGCAT |
| ATF3_HepG2_ATF3_HudsonAlpha_ChIP- | GGTCACGTGAC | GTCACGTGACC |
| seq\|ATF3_GM12878_ATF3_HudsonAlpha_ChIP- | | |
| seq\|USF1_HeLa-S3_USF2_Stanford_ChIP-seq\|ATF3_H1- | | |
| hESC_ATF3_HudsonAlpha_ChIP-seq | | |
| MYC_K562_CMYC_Stanford_ChIP- | GAGCACGTGGC | GCCACGTGCTC |
| seq\|MYC_HepG2_CMYC_UT-A_ChIP- | | |
| seq\|MYC_MYC_f1_HocoMoco | | |
| DPRX_DPRX_1_SELEX\|DPRX_1 | ACGGATTAGC | GCTAATCCGT |
| MNX1_1 | CGCCACTAATTAGTAC | GTACTAATTAGTGGCG |
| HMGA2_pTH3046_PBM | CCGCAATAAA | TTTATTGCGG |
| NRF1_disc1 | CACTGCGCATGCGCA | TGCGCATGCGCAGTG |
| PBX3_disc1 | AGCCAATGAG | CTCATTGGCT |
| TEF_TEF_2_SELEX\|NFIL3_NFIL3_1_SELEX\|NFIL3_3\|TEF_3 | TATTACATAACA | TGTTATGTAATA |
| SP1_known5 | AGGGGGCGGGGCC | GGCCCCGCCCCCT |
| NKX6-1_3 | AGTAATTAATTACTTC | GAAGTAATTAATTACT |
| KLF4_MA0599.1_ChIP-seq\|TATA_disc4\|SP1_known4 | GCCCCGCCCC | GGGGCGGGGC |
| NKX2-5_5 | AAATTCAAGTGGCTTA | TAAGCCACTTGAATTT |
| KLF4_luna_SOLEXA_5_FBgn0040765_B1H | AAATGGGCGTGGCC | GGCCACGCCCATTT |
| PAX9_PAX5_1_SELEX\|PAX5_known5 | CGTCACGCATGAGTGCT | GAGCACTCATGCGTGAC |
| | C | G |
| DLX1_Dlx2_2273_PBM\|DLX1_Dlx3_1030_PBM\|DLX1_Dlx1 | ATAATTGCC | GGCAATTAT |
| _1741_PBM | | |
| NAIF1_pTH8560_PBM | CTTACGCAA | TTGCGTAAG |
| NR3C1_known9 | AGGGGAGGTACACGGT | CCCAAAAGAACACCGTG |
| | GTTCTTTTGGG | TACCTCCCCT |
| DOBOX4_1 | TAAATAGATACCCCATA | TATGGGGTATCTATTTA |
| ALX4_2 | CGCATTAATTAATTACC | GGTAATTAATTAATGCG |
| MTF1_1 | GGGCCGTGTGCAGA | TCTGCACACGGCCC |
| TCF12_disc2 | TGAGTAAACA | TGTTTACTCA |
| TFAP2A_MA0003.2_ChIP-seq | CATTGCCTCAGGGCA | TGCCCTGAGGCAATG |
| FOXO6_pTH3846_PBM\|FOXD1_pTH5334_PBM\|FOXD1_FO | TGTAAACAA | TTGTTTACA |
| XB1_4_SELEX\|FOXB1_4 | | |
| ATF3_disc4 | CCCCGCGCCC | GGGCGCGGGG |
| SPDEF_1 | AAAAATCCGGATGTAC | GTACATCCGGATTTTT |
| RFX8_V$RFX1_02_Transfac\|RFX5_known2 | TAGTAGCCATGGCAACA | TTGTTGCCATGGCTACT |
| | A | A |
| MAFA_MAFA_f1_HocoMoco | CGAAGGCTGCGGGGTC | GTGCTGACCCCGCAGCC |
| | AGCAC | TCG |
| IRF_disc2 | ATGACTCATA | TATGAGTCAT |
| PKNOX2_MA0498.1_ChIP-seq | AGCTGTCACTCACCT | AGGTGAGTGACAGCT |
| JUN_JUNB_f1_HocoMoco\|MYC_disc3 | ATGACTCATC | GATGAGTCAT |
| ZFP161_Zfp161_2858_PBM | CGCGCGCAC | GTGCGCGCG |
| GATA_disc4 | ATCTGATA | TATCAGAT |
| STAT2_STAT2_f1_HocoMoco | GGAAAACGAAACTGA | TCAGTTTCGTTTTCC |
| IKZF2_2 | TATAGGGATAA | TTATCCCTATA |
| MAX_Max_3864_PBM\|MAX_pTH4381_PBM\|MAX_Max_3 | ACCACGTGG | CCACGTGGT |
| 863_PBM | | |
| HNF4G_HNF4A_3_SELEX\|HNF4_known18 | ATTGGACTTTGGACCC | GGGTCCAAAGTCCAAT |
| MAX_MA0058.2_ChIP-seq\|MYC_MA0147.2_ChIP-seq | AAGCACATGG | CCATGTGCTT |
| RFX8_HepG2_RFX5_Stanford_ChIP-seq | CTGTTGCTAGGCAGA | TCTGCCTAGCAACAG |
| ZEB1_V$AREB6_03_Transfac\|ZEB1_known3 | CTGCACCTGTGC | GCACAGGTGCAG |
| GCM1_I$GCM_01_Transfac | AAACCCGCATATT | AATATGCGGGTTT |
| CTCF_disc6 | ACCTAGTG | CACTAGGT |
| ESRRG_T-47D_ERALPHA_HudsonAlpha_ChIP-seq | CAAGGTCAGGGTGACCT | CCAGGTCACCCTGACCT |
| | GG | TG |
| VTN_pTH6379_PBM | AATTAATTAG | CTAATTAATT |
| LHX3_1 | AATTAATTAA | TTAATTAATT |
| IRF_known3 | CAGTTTCACTTTCCC | GGGAAAGTGAAACTG |
| GLIS2_GLIS2_1_SELEX\|GLIS2_2 | CTTCGCGGGGGGTC | GACCCCCCGCGAAG |
| THRB_THRB_2_SELEX\|THRB_2 | GTGACCTTAATAAGGTC | GTGACCTTATTAAGGTC |
| | AC | AC |
| HOXA4_pTH5887_PBM | CCTAATGAG | CTCATTAGG |
| YY2_NT2-D1_YY1_UCD_ChIP-seq | CAAGATGGCGGCC | GGCCGCCATCTTG |
| TFAP4_TFAP4_si_HocoMoco | CCGCAGCTGGC | GCCAGCTGCGG |
| AL662830.5_GM12878_PBX3_HudsonAlpha_ChIP-seq | CTCTGATTGGCCGGC | GCCGGCCAATCAGAG |
| TATA_disc10 | CCGCGGCGGC | GCCGCCGCGG |
| SIX6_Optix_Cell_FBgn0025360_B1H\|SIX6_Optix_SOLEXA_F | AAGTGATA | TATCACTT |
| Bgn0025360_B1H | | |
| HNF1A_Tcf2_0913_PBM | CTGGTTAA | TTAACCAG |
| ETV5_MA0474.1_ChIP-seq\|ETV5_MA0475.1_ChIP-seq | ACAGGAAGTGG | CCACTTCCTGT |
| CEBPB_known3 | GCCTTACCAAATA | TATTTGGTAAGGC |
| SOX15_SOX15_2_SELEX\|SOX15_3 | ATCAATAACATTGAT | ATCAATGTTATTGAT |
| STAT_disc3 | AGTTTCATTTTC | GAAAATGAAACT |
| MAFB_MAFB_f1_HocoMoco | CCGTCAGCA | TGCTGACGG |
| TFAP4_V$AP4_01_Transfac\|TFAP4_1 | AGAACCAGCTGCGGTCA | CTGACCGCAGCTGGTTC |
| | G | T |
| ATF7_pTH5083_PBM | AATGACGTCA | TGACGTCATT |
| SOX9_SOX10_5_SELEX\|SOX10_7 | TGAATGTTCAGTCA | TGACTGAACATTCA |
| NRF1_NRF1_f1_HocoMoco | CTGCGCATGCGC | GCGCATGCGCAG |
| BCL6B_1 | CAAATTCCTCGAAAGA | TCTTTCGAGGAATTTG |
| E2F2_1 | ATAAAGGCGCGCGAT | ATCGCGCGCCTTTAT |
| NR2C2_HeLa-53_TR4_UCD_ChIP-seq | ACCACTTCCGGGTCA | TGACCCGGAAGTGGT |
| VSX1_1 | AATTATTAATTAACTCG | CGAGTTAATTAATAATT |
| MYCN_V$NMYC_01_Transfac\|MYCN_1 | TCCCACGTGTCA | TGACACGTGGGA |
| TCF7L2_MA0237.2_ChIP-chip | ATCAAAGGAGCCGA | TCGGCTCCTTTGAT |
| MYC_disc5 | GCTGATGCAA | TTGCATCAGC |
| SOX18_SOX18_3_SELEX\|SOX18_4 | ATGAATGGAATTCAT | ATGAATTCCATTCAT |
| DLX1_DLX1_1_SELEX\|DLX1_2 | CCTAATTATC | GATAATTAGG |
| SMAD2_SMAD2_si_HocoMoco | CAGACGGACAC | GTGTCCGTCTG |
| CDX1_1 | TAAGGTAATAAAATTA | TAATTTTATTACCTTA |
| NR2C2_pTH6019_PBM | AAGGTCAA | TTGACCTT |
| NR4A_known1 | AAGGTCAC | GTGACCTT |
| RBPJ_2 | ACCGTGGGAAA | TTTCCCACGGT |
| MEOX2_MEOX2_2_SELEX\|MEOX2_2 | GTAATTACCGTAATTAA | TTAATTACGGTAATTAC |
| MYC_disc7 | AACACGTG | CACGTGTT |
| CTCF_disc5 | CCAGCAGGGGGCGG | CCGCCCCCTGCTGG |
| KLF4_V$AP2REP_01_Transfac\|KLF12_1 | CAGTGGG | CCCACTG |
| NR5A1_pTH5709_PBM | AAGGTCAT | ATGACCTT |
| MLXIPL_MLXPL_f1_HocoMoco | CCACGGCGGTGTCACAT | GCATGTGACACCGCCGT |
| | GC | GG |
| IRF_disc6 | AAGTTTCA | TGAAACTT |
| CTCF_HepG2_CTCF_Broad_ChIP-seq | ATAGCGCCCCCTGGTGG | GCCACCAGGGGGCGCT |
| | C | AT |
| NFE2_known1 | GTGACTCAGCA | TGCTGAGTCAC |
| GATA2_V$GATA2_02_Transfac\|GATA2_V$GATA3_02_Tran | AGAGATAAGA | TCTTATCTCT |
| sfac\|GATA2_V$GATA2_03_Transfac | | |
| CTCF_HUVEC_CTCF_UT-A_ChIP-seq | AGTGCCATCTAGTGG | CCACTAGATGGCACT |
| HIF1A_1 | CGTACGTGCGGC | GCCGCACGTACG |
| THRB_THRB_3_SELEX\|THRB_3 | GTGACCTTACATAAGGT | GTGACCTTATGTAAGGT |
| | CAC | CAC |
| SRF_K562_SRF_HudsonAlpha_ChIP-seq | AGTTGCCTTATATGGTC | GACCATATAAGGCAACT |
| ARID5A_Arid5a_3770_PBM | GATAATATTGA | TCAATATTATC |
| MYB_V$VMYB_01_Transfac | AATAACGGAA | TTCCGTTATT |
| TCF4_pTH5071_PBM | AACACCTGG | CCAGGTGTT |
| TATA_disc6 | CCAATCAGAA | TTCTGATTGG |
| POU1F1_1 | ATGAATAAAT | ATTTATTCAT |
| IRX6_1 | AAAATACATGTAAAAAT | ATTTTTACATGTATTTT |
| ALX4_1 | CCTGAGAATAATC | GATTATTCTCAGG |
| E2F3_E2F3_2_SELEX\|E2F_known25 | AAAAATGGCGCCATTTT | AAAAATGGCGCCATTTT |
| | T | T |
| NR1I3_NR1I3_si_HocoMoco | AAGTTCAT | ATGAACTT |
| POU6F1_3 | AAACATAATGAGGTTGC | GCAACCTCATTATGTTT |
| NR1I2_NR1I2_si_HocoMoco | AAGTTCAC | GTGAACTT |
| SOX9_SOX9_f1_HocoMoco | AGAACAATGGG | CCCATTGTTCT |
| PLAGL1_1 | CTAGGGGCGCCCCCAA | TTGGGGGCGCCCCTAG |
| EP300_V$P300_01_Transfac\|EP300_known1 | ACAGGGAGTGAGTG | CACTCACTCCCTGT |
| IRF4_IRF4_1_SELEX\|IRF4_2 | CCGAAACCGAAACTA | TAGTTTCGGTTTCGG |
| SRF_F$MCM1_01_Transfac | TTACCTGATTAGGAAA | TTTCCTAATCAGGTAA |
| BSX_Bsx_3483_PBM | ACCCATTAA | TTAATGGGT |
| STAT3_V$STAT3_02_Transfac | GGCTTCCC | GGGAAGCC |
| FOXD1_V$HFH3_01_Transfac\|FOXI1_1 | GGATGTTTGTTTA | TAAACAAACATCC |
| AHR::ARNT::HIF1A_1 | CCGCACGCA | TGCGTGCGG |
| NKX2-8_1 | AATTTAAGTACTTAAAA | TTTTAAGTACTTAAATT |
| MEF2B_Mv88_Ch\|P-seq\|MEF2_known11 | CTATAAATAG | CTATTTATAG |
| EMX2_pTH5673_PBM\|HOXC5_PDX1_do_HocoMoco\|EVX2 | CTAATTACC | GGTAATTAG |
| _Evx1_3952_PBM\|HOXA4_Hoxa2_3079_PBM\|EVX2_pTH6 | | |
| 436_PBM\|VAX1_Vax2_3500_PBM | | |
| NKX2-5_Nkx2-2_2823_PBM | GCACTTAAA | TTTAAGTGC |
| STAT3_GM12878_STAT3_Stanford_ChIP-seq | CAGGTGATTTCCGGGAA | CATTTCCCGGAAATCAC |
| | ATG | CTG |
| MYF6_1 | CGGACACCTGTTCTTC | GAAGAACAGGTGTCCG |
| ALX1_V$CHX10_01_Transfac\|VSX2_1 | GGCTAATTAGCGAA | TTCGCTAATTAGCC |
| CEBPA_V$CEBP_01_Transfac | AACTTACCAAACA | TGTTTGGTAAGTT |
| DMBX1_ALX1_si_Hoco Moco | ATAATTGGATTA | TAATCCAATTAT |
| TAL1_known5 | AACAGATGGTCG | CGACCATCTGTT |
| FOXP4_MA0593.1_ChIP-seq | AAGTAAACAAA | TTTGTTTACTT |
| FOXD1_MA0041.1_SELEX\|FOXD3_2 | AAACAAACATTC | GAATGTTTGTTT |
| TCF7L2_LEF1_1_SELEX\|TCF7L2_known7 | AAAGATCAAAGGGTT | AACCCTTTGATCTTT |
| AR_GCR_si_HocoMoco\|AR_PRGR_f1_HocoMoco | AGAACAG | CTGTTCT |
| TAL1_known2 | GTCACCATCTGTTCGA | TCGAACAGATGGTGAC |
| NFY_known6 | CTCAGCCAATCAGCGC | GCGCTGATTGGCTGAG |
| TCF4_sc_da_SANGER_10_FBgn0000413_B1H\|TCF4_ac_da | ACACCTGC | GCAGGTGT |
| SANGER_5_FBgn0000413_B1H | | |
| DBX2_MA0174.1_B1H | TAATAAA | TTTATTA |
| TCF4_H1-hESC_TCF12_HudsonAlpha_ChIP- | ACACCTGG | CCAGGTGT |
| seq\|TCF12_disc1 | | |
| ENSG00000234254_Tgif1_2342_PBM | AGCTGTCAAT | ATTGACAGCT |
| NR3C1_disc6 | CTCCCTGTCCCCTC | GAGGGGACAGGGAG |
| STAT_known12 | GATTTCCA | TGGAAATC |
| MAFK_MA0496.1_ChIP-seq | AAATTGCTGACTCAG | CTGAGTCAGCAATTT |
| SPIC_GM12878_PU1_HudsonAlpha_ChIP-seq | AAAAAGAGGAAGTGAA | AGTTTCACTTCCTCTTTT |
| | ACT | T |
| HES4_HES1_f1_HocoMoco | CCGCCACGAGCCC | GGGCTCGTGGCGG |
| SNAI3_pTH2340_PBM | AGCTGTCAAA | TTTGACAGCT |
| AL662828.6_ATF6A_si_HocoMoco | CCACGTCACCAC | GTGGTGACGTGG |
| RFX5_known5 | ACCGTTGCTATGGTA | TACCATAGCAACGGT |
| ESRRG_ESRRA_2_SELEX\|ESRRG_ESRRA_5_SELEX\|ESRRA_k | AAGGTCATTCAAGGTCA | TGACCTTGAATGACCTT |
| nown8 | | |
| MYBL2_MYBB_f1_HocoMoco | TCAACCTGCA | TGCAGGTTGA |
| NAIF1_pTH9299_PBM | TTACGCAAA | TTTGCGTAA |
| FOSL1_FOSB_f1_HocoMoco | CTGACTCATC | GATGAGTCAG |
| SPIC_MA0081.1_SELEX\|SPIB_1 | AGAGGAA | TTCCTCT |
| STAT_disc1 | TTCCAGGAAA | TTTCCTGGAA |
| LHX1_Lhx3_3431_PBM | ATTTAATTA | TAATTAAAT |
| ZBTB7C_ZBT7A_a_HocoMoco | AGCAGTGGGTCCCCCAG | CTGGGGGACCCACTGCT |
| TP53_Tp53_2_SELEX\|TP53_6 | ACATGTCATAGACATGT | ACATGTCTATGACATGT |
| HSF_disc1 | GTTATGCAAC | GTTGCATAAC |
| ZNF8_1 | TCTTTGGCGTACCCTAA | TTAGGGTACGCCAAAGA |
| CDX2_CDX1_f1_HocoMoco | ACATAAAT | ATTTATGT |
| HOXB13_1 | AACCCAATAAAATTCG | CGAATTTTATTGGGTT |
| PITX2_1 | TGTAATCCCAA | TTGGGATTACA |
| PROX1_PROX1_1_SELEX\|PROX1_1 | CAAGACGCCTTA | TAAGGCGTCTTG |
| FOXM1_1 | AGATGGACT | AGTCCATCT |
| TATA_disc3 | ACCGGAAG | CTTCCGGT |
| BPTF_BPTF_si_HocoMoco | GAACACAACAAA | TTTGTTGTGTTC |
| ARID3C_pTH5119_PBM | TAATCAAA | TTTGATTA |
| IRF9_IRF9_1_SELEX\|IRF_known21 | AACGAAACCGAAACT | AGTTTCGGTTTCGTT |
| BARX1_BARX1_1_SELEX\|BARX1_2 | CAATTAAATACCGATTA | TAATCGGTATTTAATTG |
| FOXD1_bin_FlyReg_FBgn0045759_B1H | TAAACAAAGA | TCTTTGTTTA |
| HLX_1 | CCATAATTAATTACA | TGTAATTAATTATGG |
| STAT3_MA0144.2_ChIP-seq | CTTCTGGGAAA | TTTCCCAGAAG |
| HSF1_HSF1_2_SELEX\|HSF2_HSF2_1_SELEX\|HSF1_HSF4_1_ | GAACGTTCTAGAA | TTCTAGAACGTTC |
| SELEX\|HSFLHSF1_1_SELEX\|HSF_known4\|HSF_known5\|H | | |
| SF2_2\|HSF4_1 | | |
| STAT1_K562_STAT1_Stanford_ChIP-seq | TTTCCCGGAAA | TTTCCGGGAAA |
| EGR1_disc4 | AACTACAATTCCCAGAA | GCGGGGCATTCTGGGA |
| | TGCCCCGC | ATTGTAGTT |
| GBX2_Gbx2_1_SELEX\|GBX2_GBX2_3_SELEX\|GBX2_GBX2_ | ACCAATTAGC | GCTAATTGGT |
| 1_SELEX\|GBX2_2\|GBX2_4\|GBX2_5 | | |
| ISL2_1 | AAATTAATTGATTTTG | CAAAATCAATTAATTT |
| TFAP4_TFAP4_2_SELEX\|TFAP4_TFAP4_1_SELEX\|TFAP4_5\| | AACAGCTGAT | ATCAGCTGTT |
| TFAP4_6 | | |
| CTCF_HSMMtube_CTCF_Broad_ChIP-seq | GGCCACCAGGGGGCGC | TAGCGCCCCCTGGTGGC |
| | TA | C |
| BARHL1_1 | AACAACCAATTAATTC | GAATTAATTGGTTGTT |
| EOMES_pTH2659_PBM | GAGGTGTGAA | TTCACACCTC |
| ZBED1_ZBED1_1_SELEX\|ZBED1_1 | CTATCGCGACATA | TATGTCGCGATAG |
| FOXJ3_MA0296.1_PBM | TCCTCTTTGTTTACAATT | TGAATTGTAAACAAAGA |
| | CA | GGA |
| RAD21_disc3 | ACAAGAGGGC | GCCCTCTTGT |
| RFX8_MA0509.1_ChIP-seq | GTTGCCATGGCAAC | GTTGCCATGGCAAC |
| AL662830.5_pTH6425_PBM | CACATCAA | TTGATGTG |
| IRF_disc5 | AGGAAGTGAA | TTCACTTCCT |
| SRF_disc1 | CCTTATAAGG | CCTTATAAGG |
| E2F_known10\|E2F_known11\|E2F_known13 | GCGGGAAA | TTTCCCGC |
| REST_GM12878_NRSF_HudsonAlpha_ChIP-seq | TCCATGGTGCTGAA | TTCAGCACCATGGA |
| ATF1_CREB1_f1_HocoMoco\|ATF3_known14 | GTGACGTCA | TGACGTCAC |
| PROP1_PROP1_f1_HocoMoco | GAGAAATTAATATAA | TTATATTAATTTCTC |
| ARNT2_V$ARNT_02_Transfac\|ARNT_2 | CAAAGGTCACGTGACCT | CAAAGGTCACGTGACCT |
| | TTG | TTG |
| TEAD3_TEAD3_si_HocoMoco | GATATTTCTGCTCTA | TAGAGCAGAAATATC |
| BCL6_BCL6_f1_HocoMoco | AAAAGCTTTCTAGGAA | TTCCTAGAAAGCTTTT |
| E2F_disc3 | CTTTCCCGCCCCC | GGGGGCGGGAAAG |
| USF1_USF1_f1_HocoMoco\|MAX_K562_MAX_Stanford_ChI | CCACGTGACC | GGTCACGTGG |
| P- | | |
| seq\|MITF_pTH5465_PBM\|MITF_pTH5065_PBM\|MITF_pT | | |
| H5057_PBM\|MXI1_known1 | | |
| DMBX1_ALX3_3_SELEX\|ALX3_4 | CTAATTTAATTAA | TTAATTAAATTAG |
| PLAG1_MA0163.1_B1H\|PLAG1_1 | CCCCCTTGGGCCCC | GGGGCCCAAGGGGG |
| SPI1_disc3 | AGGAGGGGGCAGTG | CACTGCCCCCTCCT |
| HOXC9_MA0165.1_B1H | TCATAAA | TTTATGA |
| REST_REST_f1_HocoMoco | GGGCGCTGTCCATGGTG | TTCAGCACCATGGACAG |
| | CTGAA | CGCCC |
| HOXC10_MA0594.1_ChIP-seq | GCCATAAATCA | TGATTTATGGC |
| TBPL2_Spt15_PBM | AATATAT | ATATATT |
| LHX9_LHX2_1_SELEX\|LHX2_2 | ACTAATTAAC | GTTAATTAGT |
| MAFA_NRL_1_SELEX\|NRL_1 | AATTTGCTGAC | GTCAGCAAATT |
| HNF4_disc1 | AGGTCAAAGTCCA | TGGACTTTGACCT |
| BDP1_disc2 | GGATTCGAAC | GTTCGAATCC |
| YY2_GM12891_YY1_HudsonAlpha_ChIP-seq | AAGATGGCGGC | GCCGCCATCTT |
| BRCA1_HeLa-S3_BRCA1_Stanford_ChIP-seq | CAAATCTCGCGAGA | TCTCGCGAGATTTG |
| ATF3_known8 | CGTTGACGTCAC | GTGACGTCAACG |
| FIGLA_FIGLA_1_SELEX\|TCF4_dei_da_SANGER_5_FBgn000 | AACAGGTGGT | ACCACCTGTT |
| 0413_B1H\|FIGLA_1 | | |
| ZIC4_ZIC1_1_SELEX\|ZIC1_3 | CACAGCGGGGGGTC | GACCCCCCGCTGTG |
| E2F4_E2F4_1_SELEX\|E2F_kn0wn29 | AATGGCGCCAAA | TTTGGCGCCATT |
| EVX2_Eve_Cell_FBgn0000606_B1H\|EVX2_Evx2_2645_PBM | GCTAATGA | TCATTAGC |
| ZBTB3_1 | AATCGCACTGCATTCCG | CGGAATGCAGTGCGATT |
| MLX_pTH5070_PBM | CCACGTGATC | GATCACGTGG |
| AL662830.5_Exd_Cell_FBgn0000611_B1H\|AL662830.5_Ex | TGTCAAAA | TTTTGACA |
| d_SOLEXA_FBgn0000611_B1H\|AL662830.5_MA0222.1_B1 | | |
| H | | |
| ETS_known10 | CAATACCGGAAGTGTAA | TTACACTTCCGGTATTG |
| UBP1_UBIP1_f1_HocoMoco | GCAGAGA | TCTCTGC |
| EGR3_Egr1_2580_PBM | CGCCCCCGCA | TGCGGGGGCG |
| HOXA9_1 | ACGGCCATAAAATTAAT | ATTAATTTTATGGCCGT |
| POU3F3_pTH9225_PBM | CTAATTATAC | GTATAATTAG |
| SPZ1_SPZ1_f1_HocoMoco | CCCAGGGTAACAGCCG | CGGCTGTTACCCTGGG |
| BHLHE40_pTH5060_PBM | ACACGTGCC | GGCACGTGT |
| SIX5_known6 | AATAGGGTATCAATTAT | ATAATTGATACCCTATT |
| MAF_known5 | AAGTCAGCATTTTTA | TAAAAATGCTGACTT |
| HOXC5_Hoxb8_3780_PBM\|HOXC5_Hoxa7_2668_PBM | GGCCATTAA | TTAATGGCC |
| HOXA7_2 | CGAGTTAATTAATAAGC | GCTTATTAATTAACTCG |
| ARID5A_V$MRF2_01_Transfac\|ARID56_1 | AACCACAATACCAA | TTGGTATTGTGGTT |
| TCF7L2_disc2 | ACATCAAAGG | CCTTTGATGT |
| IRF7_V$IRF7_01_Transfac\|RF_known4 | CCAACTTTCGATTTCCTA | TAGGAAATCGAAAGTTG |
| | | G |
| SOX30_1 | AATTCCATTGTTCAAT | ATTGAACAATGGAATT |
| PITX2_PITX1_2_SELEX\|PITX2_PITX1_1_SELEX\|PITX2_PITX3 | CTTAATCCC | GGGATTAAG |
| _1_SELEX\|PITX1_2\|PITX1_3\|PITX3_2 | | |
| PRDM1_disc2 | ATGACTCACC | GGTGAGTCAT |
| SMAD3_1 | AGACAGACA | TGTCTGTCT |
| ELF1_MA0026.1_SELEX | CCGGAAG | CTTCCGG |
| SOX1_Sox1_4_SELEX\|SOX1_5 | TGAATAGTCATTCA | TGAATGACTATTCA |
| FOXA_known1 | TAAATAAATATTTCA | TGAAATATTTATTTA |
| LCOR_pTH9275_PBM | ATTTTGGG | CCCAAAAT |
| DMBX1_Alx4_1_SELEX\|ALX4_4 | ATAATTAAATTAA | TTAATTTAATTAT |
| CREB3L2_Creb3l2_1_SELEX\|CREB3L2_1 | TGATGACGTGGCA | TGCCACGTCATCA |
| HOXC6_HXC8_f1_HocoMoco | GGGCATCAATCAAA | TTTGATTGATGCCC |
| BATF_disc1 | GAAATGAGTCA | TGACTCATTTC |
| DDIT3_DDIT3_f1_HocoMoco | AAATGCAATCCCC | GGGGATTGCATTT |
| CUX1_CUX2_2_SELEX\|CUX1_CUX1_3_SELEX\|CUX1_10\|CU | TAATCGATAA | TTATCGATTA |
| X2_2 | | |
| ZBTB12_1 | CTAAGGTTCTAGATCAC | GTGATCTAGAACCTTAG |
| ISX_pTH6551_PBM\|ALX1_pTH6221_PBM | AATTAATTAGT | ACTAATTAATT |
| NFAT5_N FAT5_1_SELEX\|N FAT5_1 | ATGGAAAATTACAG | CTGTAATTTTCCAT |
| HNF4_known12 | CCCCCTGACCTTTGCCCT | GGCAGAGGGCAAAGGT |
| | CTGCC | CAGGGGG |
| TBPL2_V$TATA_C_Transfac\|TATA_known1 | CTTTTATAGA | TCTATAAAAG |
| HOXA4_Zen2_Cell_FBgn0004054_B1H | TAATTAAGA | TCTTAATTA |
| GATA_disc6 | AGCTGACT | AGTCAGCT |
| SRY_MA0084.1_SELEX\|SRY_3 | ATTGTTTAC | GTAAACAAT |
| ETV5_FEV_f1_HocoMoco | CAGGAAATAA | TTATTTCCTG |
| HOXC10_HOXD11_1_SELEX\|HOXD11_2 | GTCGTAAAAA | TTTTTACGAC |
| ZBTB7B_Zbtb7b_1054_PBM | AGCCCCCCAA | TTGGGGGGCT |
| ZFY_MA0146.2_ChIP-seq\|ZFX_1 | CAGGCCTCGGCCCC | GGGGCCGAGGCCTG |
| NR4A2_N R4A2_1_SELEX\|NR4A_known2 | AGGTCAAACTGTGACCT | AGGTCACAGTTTGACCT |
| GFI1B_MA0038.1_SELEX\|GFI1_3 | CAAATCACTG | CAGTGATTTG |
| ATF1_V$TAXCREB_01_Transfac\|ATF3_known4 | GGGGGTTGACGCAGA | TCTGCGTCAACCCCC |
| HOXB13_Hoxd13_2_SELEX\|HOXB13_HOXD13_2_SELEX\|H | GCTCGTAAAAC | GTTTTACGAGC |
| OXB13_HOXA13_2_SELEX\|HOXA13_3\|HOXD13_3\|HOXD1 | | |
| 3_5 | | |
| HOXB13_HOXB13_2_SELEX\|HOXB13_HOXC13_2_SELEX\|H | GCTCGTAAAAA | TTTTTACGAGC |
| OXB13_3\|HOXC13_3 | | |
| MYOD1_MYOD1_f1_HocoMoco | GACAGCTGC | GCAGCTGTC |
| USF1_GM12878_USF1_HudsonAlpha_ChIP-seq | CCCGCCACGTGACCC | GGGTCACGTGGCGGG |
| PKNOX2_1 | AAGCACCTGTCAATAT | ATATTGACAGGTGCTT |
| ENSG00000234254_TGIF1_f1_HocoMoco | CAGGTGACACCTGACA | TGTCAGGTGTCACCTG |
| EGR3_EGR1_f2_HocoMoco | CCGCCCCCGCA | TGCGGGGGCGG |
| IKZF1_IKZF1_f1_HocoMoco | TCTCCCAA | TTGGGAGA |
| MYBL1_V$MYB_Q6_Transfac | GCCAGTTGAC | GTCAACTGGC |
| TBX3_pTH9289_PBM\|TBX3_pTH3998_PBM | AAGGTGTCAA | TTGACACCTT |
| PAX5_MA0239.1_B1H\|OVOL1_MA0126.1_SELEX | ACTGTTACT | AGTAACAGT |
| SPZ1_V$SPZ1_01_Transfac\|SPZ1_1 | GCAGGAGGGTATGGC | GCCATACCCTCCTGC |
| PPARA_V$PPARG_01_Transfac | CGGATGACCTTTGACCC | TCAGGGGTCAAAGGTC |
| | CTGA | ATCCG |
| ZNF263_K562b_ZNF263_UCD_ChIP-seq | CTCCTCCCCTCCCTCCTC | GGGGAGGAGGGAGGG |
| | CCC | GAGGAG |
| KIAA0415_Fkh2_PBM\|FOXD1_pTH2846_PBM\|FOXJ3_Fkh1 | ATGTAAACAA | TTGTTTACAT |
| _PBM\|FOXD1_pTH6641_PBM\|FOXD1_pTH6108_PBM | | |
| RFX8_pTH9199_PBM\|RFX8_pTH9385_PBM\|RFX8_Rfx4_37 | CCATGGCAAC | GTTGCCATGG |
| 61_PBM\|MYC_disc4 | | |
| OTX2_1 | GACAATTAATCCCTACA | TGTAGGGATTAATTGTC |
| MAFK_MAFK_1_SELEX\|MAF_known6 | AAATTTGCTGAC | GTCAGCAAATTT |
| MYC_known6 | GCCACGTGAC | GTCACGTGGC |
| ELF5_1 | AAGGAAGTA | TACTTCCTT |
| SCRT2_CG12605_SANGER_10_FBgn0035481_B1H | CAACAGGTG | CACCTGTTG |
| BCL_disc7 | ACAGCTCCC | GGGAGCTGT |
| HMGA1_2 | AATGCAATTTTTTGA | TCAAAAAATTGCATT |
| BRCA1_GM12878_BRCA1_Stanford_ChIP-seq | AAATCTCGCGAGAAC | GTTCTCGCGAGATTT |
| TCF3_4 | CCACCTGCCGCAGG | CCTGCGGCAGGTGG |
| RARG_RARG_4_SELEX\|RARG_4 | GAGGTCAAAAGGTCAC | GTGACCTTTTGACCTC |
| NR2F2_NR2F1_2_SELEX\|HNF4_known24 | GAGGTCAAAAGGTCAA | TTGACCTTTTGACCTC |
| IRX3_Ara_SOLEXA_FBgn0015904_B1H\|IRX3_Mirr_SOLEXA | ATAACA | TGTTAT |
| _FBgn0014343_B1H\|IRX3_Caup_SOLEXA_FBgn0015919_B | | |
| 1H | | |
| ARNT2_ARNT_f1_HocoMoco\|BHLHE40_pTH4330_PBM\|ID | GCACGTGA | TCACGTGC |
| 4_pTH5068_PBM | | |
| SIN3A_disc4 | ACAGCTCCT | AGGAGCTGT |
| ETS_disc9 | CGCCGCCCCCGC | GCGGGGGCGGCG |
| SOX1_SOX2_4_SELEX\|SOX2_5 | GAACAATAACATTGTTC | GAACAATGTTATTGTTC |
| E2F2_E2F2_f1_HocoMoco\|E2F_known21 | GGCGCGAAAC | GTTTCGCGCC |
| CUX1_V$CDPCR3HD_01_Transfac\|CUX1_5 | GATCGATCCC | GGGATCGATC |
| HOXC10_HOXA10_1_SELEX\|HOXA10_2 | ATTTTTACGACC | GGTCGTAAAAAT |
| DUX4_1 | CACCGTTGATTGGGTCG | CGACCCAATCAACGGTG |
| NR1H_2 | GGGTTACTGGCGGTCA | TGACCGCCAGTAACCC |
| SPDEF_Spdef_0905_PBM | ACATCCGGGT | ACCCGGATGT |
| ATF3_known16 | ACGATGACGTCATCGA | TCGATGACGTCATCGT |
| POU1F1_pTH4326_PBM | ATTATTAATA | TATTAATAAT |
| SIX2_pTH5690_PBM | AGGGTATCA | TGATACCCT |
| SP9_pTH0978_PBM | CCCGCCCCC | GGGGGCGGG |
| NKX2-6_tin_FlyReg_FBgn0004110_B1H | GGCCACTTGAGA | TCTCAAGTGGCC |
| E2F_disc8 | GCAGGCGCCGC | GCGGCGCCTGC |
| TCF4_MA0522.1_ChIP-seq | CACAGCTGCAG | CTGCAGCTGTG |
| HOXB6_1 | AAGGTAATTACCAATA | TATTGGTAATTACCTT |
| GATA2_HUVEC_GATA2_UCD_ChIP- | ACAGATAAGAA | TTCTTATCTGT |
| seq\|GATA2_MA0035.3_ChIP-seq\|GATA_known15 | | |
| FOSL2_MA0478.1_ChIP-seq\|JUN_MA0490.1_ChIP-seq | ATGAGTCATCC | GGATGACTCAT |
| DMBX1_1 | TGAACCGGATTAATGAA | TTCATTAATCCGGTTCA |
| MEOX2_MEOX2_1_SELEX\|HOXC5_Hoxd3_1_SELEX\|HOXB2 | AGTAATTAAC | GTTAATTACT |
| _HOXB2_1_SELEX\|HOXB2_1\|HOXD3_2\|MEOX2_1 | | |
| TP53_Tp53_3_SELEX\|TP53_7 | AACATGCCCGGGCATGT | GACATGCCCGGGCATGT |
| | C | T |
| HEY1_HEY2_2_SELEX\|HEY1_HEY2_1_SELEX\|HEY1_HEY1_1 | GACACGTGCC | GGCACGTGTC |
| SELEX\|NPAS2_pTH5457_PBM\|HEY1_known1\|HEY2_1\|HE | | |
| Y2_2 | | |
| RFX8_pTH9223_PBM\|RFX8_pTH9226_PBM | CCTTAGCAAC | GTTGCTAAGG |
| ETV5_MA0028.1_SELEX\|ETS_known7 | CTTCCGGCTC | GAGCCGGAAG |
| GCM1_pTH8653_PBM | ATGCGGGTAC | GTACCCGCAT |
| ZNF263_MA0528.1_ChIP-seq | GGAGGAGGAGGGGGA | TCCTCCTCCCCCTCCTCC |
| | GGAGGA | TCC |
| BX088580.2_GSE11329_bioOct4_ChIP-seq | TTTGCATAACAAAAA | TTTTTGTTATGCAAA |
| SRF_HepG2_SRF_HudsonAlpha_ChIP-seq | CATGCCCATATAAGGCA | TTGCCTTATATGGGCAT |
| | A | G |
| TGIF1_Achi_Cell_FBgn0033749_B1H | TGTCAAA | TTTGACA |
| BX088580.2_MA0142.1_ChIP-seq\|POU5F1_known3 | ATTTGCATAACAAAG | CTTTGTTATGCAAAT |
| SRF_known7 | CCATATATGGGC | GCCCATATATGG |
| TATA_disc7 | GAAGGAAGCGGAAGA | TCTTCCGCTTCCTTC |
| MSX1_MA0188.1_B1H | CCAATTA | TAATTGG |
| NR2C2_pTH6174_PBM\|RARG_pTH5430_PBM | AGGTCACG | CGTGACCT |
| OTP_OTX2_si_HocoMoco | CTTTAATCCCTTAAC | GTTAAGGGATTAAAG |
| TBX1_pTH3822_PBM | AGGTGTGAAGA | TCTTCACACCT |
| HDAC2_disc3 | GGTGCTGTCCGTGGTGC | TCAGCACCACGGACAGC |
| | TGA | ACC |
| SREBF2_SRBP2_f1_HocoMoco | CCTCACCCCACCC | GGGTGGGGTGAGG |
| SREBP_known4 | GCGATCACCCCA | TGGGGTGATCGC |
| ONECUT3_pTH8982_PBM | AATCGATAA | TTATCGATT |
| ZBTB42_ZNF238_2_SELEX\|ZBTB18_3 | CATCCAGATGTTC | GAACATCTGGATG |
| E2F4_E2F5_do_HocoMoco | CGCGCCAAAC | GTTTGGCGCG |
| TOPORS_V$LUN1_01_Transfac\|TOPORS_1 | TCCCAAAGTAGCTGGGA | TCCCAGCTACTTTGGGA |
| FOXJ3_pTH5634_PBM | GTAAACAAC | GTTGTTTAC |
| FOXD1_pTH6497_PBM\|FOXD1_pTH3043_PBM\|FOXD1_pT | GTAAACAAA | TTTGTTTAC |
| H6591_PBM | | |
| RFX8_RFX3_2_SELEX\|RFX3_3 | CGTTGCTAGGCAACC | GGTTGCCTAGCAACG |
| NKX1-1_Nkx1-2_3214_PBM\|ALX1_Rax_3443_PBM | CCAATTAGC | GCTAATTGG |
| HOXC5_V$HOXA3_01_Transfac\|HOXA3_1 | CCAATTAGG | CCTAATTGG |
| NR2E1_pTH5714_PBM | AAATTGACCTCA | TGAGGTCAATTT |
| FOSL1_MA0477.1_ChIP-seq | CATGAGTCACC | GGTGACTCATG |
| LBX2_MA0231.1_B1H | TAACTA | TAGTTA |
| AHR_VSAHR_01_Transfac | CCCCGGGCTTGCGTGAG | TCTCACGCAAGCCCGGG |
| | A | G |
| GMEB2_GMEB2_4_SELEX\|ATF7_V$CREBP1_01_Transfac\|Z | TTACGTAA | TTACGTAA |
| HX1_pTH5688_PBM\|ATF2_1\|GMEB2_4 | | |
| ZNF274_HepG2b_ZNF274_UCD_ChIP-seq | GGTTTCTCTCCAGTA | TACTGGAGAGAAACC |
| NFATC1_NFAC2_f1_HocoMoco | AATTTTCCA | TGGAAAATT |
| TCF4_TFE2_f2_HocoMoco | ACCAGATGGTC | GACCATCTGGT |
| ETV6_ETV6_1_SELEX\|ETV6_1 | CACTTCCGCTTCCGG | CCGGAAGCGGAAGTG |
| HOXC5_Hoxb7_3953_PBM\|HOXC5_Hoxd8_2644_PBM | GCCATTAA | TTAATGGC |
| AR_A549_GR_HudsonAlpha_ChIP-seq | GAACAGAATGTTCC | GGAACATTCTGTTC |
| EBF1_disc1 | TCCCCGGGGA | TCCCCGGGGA |
| SMAD4_SMAD4_si_HocoMoco | GGCCAGACA | TGTCTGGCC |
| ARNT2_pTH5064_PBM\|BHLHE40_HepG2_BHLHE40_Hudso | GCACGTGACC | GGTCACGTGC |
| nAlpha_ChIP-seq | | |
| EGR3_pTH9317_PBM\|EGR3_Zif268_PBM | CGCCCACG | CGTGGGCG |
| RFX8_V$RFX1_01_Transfac\|RFX5_known 1 | TAGTAGCCTGGCAACAA | TTGTTGCCAGGCTACTA |
| GATA2_Mv75_ChIP-seq | AGATATTATC | GATAATATCT |
| VDR_4 | GGGTCAACGAGTTCA | TGAACTCGTTGACCC |
| NR4A2_pTH3467_PBM\|NR2F2_Mv102_ChIP-seq | AAAGGTCA | TGACCTTT |
| XBP1_pTH2852_PBM | ACACGTCATC | GATGACGTGT |
| SOX2_SOX21_4_SELEX\|SRY_SRY_4_SELEX\|SOX21_5\|SRY_8 | TGAATAACATTCA | TGAATGTTATTCA |
| FOXD1_GSE15244_FoxA1_ChIP-seq | AAAGCAAACA | TGTTTGCTTT |
| HOXC5_Ftz_Cell_FBgn0001077_B1H | GTTAATGA | TCATTAAC |
| GATA2_GATA5_f1_HocoMoco | ATCTAAGTTATCTCTTA | TAAGAGATAACTTAGAT |
| E4F1_1 | GCTACGTCAC | GTGACGTAGC |
| POU3F3_MA0453.1_B1H | CTAATTTGCATA | TATGCAAATTAG |
| YY2_V$YY1_01_Transfac | GATCTCCATTTTTGGAC | GTCCAAAAATGGAGATC |
| NR3C1_disc5\|FOXA_disc3 | CCTGCTGA | TCAGCAGG |
| PAX9_V$PAX5_02_Transfac\|PAX5_known2 | AAACAGATACCTGAAGC | TGTATGGTCACGCTTCA |
| | GTGACCATACA | GGTATCTGTTT |
| ZEB1_V$AREB6_01_Transfac\|ZEB1_known1 | ACACAGGTAAGTA | TACTTACCTGTGT |
| FOX06_V$FOXO4_01_Transfac\|FOXO4_1 | ATAAACAAGCC | GGCTTGTTTAT |
| SOX9_SOX10_4_SELEX\|SOX9_Sox10_3_SELEX\|SOX10_6\|S | ATGAATTGCAGTCAT | ATGACTGCAATTCAT |
| OX10_10 | | |
| ZNF683_HeLa-53_PRDM1_Stanford_ChIP- | AGAAAGTGAAAGTGA | TCACTTTCACTTTCT |
| seq\|PRDM1_PRDM1_1_SELEX\|PRDM1_MA0508.1_ChIP- | | |
| seq\|PRDM1_known2 | | |
| MEOX2_MEOX2_3_SELEX\|MEOX2_3 | CTAATCATCATTAA | TTAATGATGATTAG |
| MYB_5 | CAACGGCC | GGCCGTTG |
| CTCF_disc4 | CACTAGATGGCAGC | GCTGCCATCTAGTG |
| THRB_THRB_1_SELEX\|THRB_1 | GTGACCTTATAAGGTCA | GTGACCTTATAAGGTCA |
| | C | C |
| NFYA_MA0060.2_ChIP-seq | AGAGTGCTGATTGGTCC | TGGACCAATCAGCACTC |
| | A | T |
| PAX9_PAX5_f1_HocoMoco | GAGGGCAGTGAAGCGT | GTCACGCTTCACTGCCC |
| | GAC | TC |
| TCF7L2_known6 | ATTTCCTTTGATCTATA | TATAGATCAAAGGAAAT |
| NFE2L2_1 | ACCGGAAGAG | CTCTTCCGGT |
| TCF4_V$E47_02_Transfac | ATTAACAGGTGTTCAC | GTGAACACCTGTTAAT |
| VDR_VDR_1_SELEX\|VDR_5 | GAGTTCATTGAGTTCA | TGAACTCAATGAACTC |
| MYBL2_MYBL2_4_SELEX\|MYBL2_4 | AACCGTTAAACGGTC | GACCGTTTAACGGTT |
| MEF2_disc3\|AP1_known5 | ATGAGTCAG | CTGACTCAT |
| MYBL1_1 | AAATTAACGGTTTTCAA | TTGAAAACCGTTAATTT |
| RORB_pTH6589_PBM | ACTGACCTCG | CGAGGTCAGT |
| POU3F3_POU2F1_2_SELEX\|POU2F2_known16 | CATGAATATTCATA | TATGAATATTCATG |
| FOXD1_FOXL1_2_SELEX\|FOXL1_5 | TGTAAATAAACAA | TTGTTTATTTACA |
| HDAC2_disc5 | AAAGTCCAG | CTGGACTTT |
| ZNF143_known1 | GATTTCCCATAATGCCTT | GCAAGGCATTATGGGA |
| | GC | AATC |
| HSF1_V$HSF1_01_Transfac\|HSF2_V$HSF2_01_Transfac\|H | AGAATGTTCG | CGAACATTCT |
| SF_known1 | | |
| LM02_V$LMO2COM_02_Transfac\|LMO2_2 | CAGATAGGG | CCCTATCTG |
| RREB1_MA0073.1_SELEX | CCCCAAACCACCCCCCC | GGGGGGGGGGTGGTTT |
| | CCC | GGGG |
| RREB1_2 | CCCCAAACCACCCCCCC | TGGGGGGGGGTGGTTT |
| | CCA | GGGG |
| EGR3_pTH3091_PBM | CGCCCACGCA | TGCGTGGGCG |
| SOX9_SOX10_2_SELEX\|SOX10_4 | AACAATGTTCAGTGTT | AACACTGAACATTGTT |
| FOXD1_V$HFH8_01_Transfac\|FOXF1_1 | CATATAAACAATG | CATTGTTTATATG |
| HMGA2_pTH8216_PBM | CCGGAAAAA | TTTTTCCGG |
| FOXO6_FOXO3_si_HocoMoco | AGGTAAACAAACA | TGTTTGTTTACCT |
| NKX1-2_1 | GTGCACTAATTAGTGCA | TGCACTAATTAGTGCAC |
| SMAD_2 | CTGTCTGGCTA | TAGCCAGACAG |
| TCF7L2_Tcf7_0950_PBM | AACATCAAA | TTTGATGTT |
| FOXA_known4 | GACTAAGCAAACAATGA | TTCATTGTTTGCTTAGTC |
| | A | |
| MYOD1_nau_SANGER_5_FBgn0002922_B1H | AACAGCTGACGC | GCGTCAGCTGTT |
| IRX3_IRX5_1_SELEX\|IRX3_IRX2_1_SELEX\|IRX2_2\|IRX5_2 | CATGTCATGTAA | TTACATGACATG |
| TCF3_1 | ACGGCAGGTGTCCCC | GGGGACACCTGCCGT |
| YY1_disc2 | AAACATGGCG | CGCCATGTTT |
| NFATC1_NFAC1_do_HocoMoco | ATGGAAATTTCCA | TGGAAATTTCCAT |
| ARNT_MA0004.1_SELEX\|MYC_known10\|ARNT_3 | CACGTG | CACGTG |
| MAFB_Mafb_1_SELEX\|MAF_disc2\|MAF_known10 | AAAATGCTGACT | AGTCAGCATTTT |
| TBPL2_Tbp_pr781_PBM | ATATAAA | TTTATAT |
| E2F_known23 | ATAAGGGCGCGCGAT | ATCGCGCGCCCTTAT |
| GATA2_pTH1049_PBM | CAGATAAGG | CCTTATCTG |
| BBX_Bbx_3753_PBM | TCAATGAA | TTCATTGA |
| SRF_SRF_do_HocoMoco | ATGCCCATATATGGA | TCCATATATGGGCAT |
| PAX8_1 | ACAGTCATGCGTGAGTT | TAACTCACGCATGACTG |
| | A | T |
| CACD_1 | CAACCCCTGGGTGTGG | CCACACCCAGGGGTTG |
| ELF3_1 | TACAAGGAAGTAA | TTACTTCCTTGTA |
| LHX1_1 | CATTATTAATTAATTCG | CGAATTAATTAATAATG |
| SRF_SRF_2_SELEX\|SRF_known10 | TGACCATATATGGTCA | TGACCATATATGGTCA |
| MEF2B_V$MEF2_01_Transfac\|MEF2_known1 | AGAGTTATTTTTAGAG | CTCTAAAAATAACTCT |
| ZNF143_V$STAF_01_Transfac | GGCGCAATGCATTGTGG | TTTACCCACAATGCATT |
| | GTAAA | GCGCC |
| TRIM28_disc2 | AGAGAAACC | GGTTTCTCT |
| PITX2_Ptx1_SOLEXA_FBgn0020912_B1H | GGATTAAC | GTTAATCC |
| ZNF202_pTH3075_PBM | AAGGGGGGCA | TGCCCCCCTT |
| RHOXF1_2 | AGGACGCTGTAAAGGG | TCCCTTTACAGCGTCCT |
| | A | |
| TFAP2A_V$AP2ALPHA_01_Transfac\|TFAP2A_V$AP2GAM | CCCCCGGGC | GCCCGGGGG |
| MA_01_Transfac\|TFAP2_known2\|TFAP2_known3\|TFAP2_ | | |
| known8 | | |
| NKX2-5_MA0264.1_PBM | ACCACTTGAAA | TTTCAAGTGGT |
| EGR3_H1-hESC_EGR1_HudsonAlpha_ChIP-seq | CCCCGCCCCCGCACC | GGTGCGGGGGCGGGG |
| BARHL2_BARHL2_1_SELEX\|BARHL2_2 | ACCGTTTAAC | GTTAAACGGT |
| FOXP3_1 | GAAATGTTGTTTCAGAC | GTCTGAAACAACATTTC |
| NFKB2_N FKB2_f1_HocoMoco | AGGGAGATTCC | GGAATCTCCCT |
| ELF1_HepG2_ELF1_HudsonAlpha_ChIP-seq | CCACTTCCGGGTTC | GAACCCGGAAGTGG |
| HMX1_Hmx2_3424_PBM\|TLX3_pTH6482_PBM | AACCAATTAA | TTAATTGGTT |
| HOXA7_3 | GTAGTAATTAATGGAA | TTCCATTAATTACTAC |
| ZNF784_ZNF784_1_SELEX\|ZNF784_1 | AGGTAGGTAC | GTACCTACCT |
| TCF4_TCF3_1_SELEX\|TCF3_7 | AACACCTGCT | AGCAGGTGTT |
| SP9_MA0516.1_ChIP-seq\|SP1_disc3 | GCCCCGCCCCCTCCC | GGGAGGGGGCGGGGC |
| HES4_pTH5259_PBM | GCACGTGTCGTTA | TAACGACACGTGC |
| NR2F2_pTH2193_PBM | AAAGGTCAAG | CTTGACCTTT |
| ZNF219_ZN219_f1_HocoMoco | GAGGGGGGCGGA | TCCGCCCCCCTC |
| FOXO6_FOXO4_3_SELEX\|FOXO6_FOXO1_3_SELEX\|FOXO1 | CGTGTGGGGAAA | TTTCCCCACACG |
| _5\|FOXO4_5 | | |
| CR936877.3_RXRB_1_SELEX\|CR936877.3_RXRA_3_SELEX\| | GGGGTCAAAGGTCA | TGACCTTTGACCCC |
| CR936877.3_RXRG_3_SELEX\|CR936877.3_RXRA_1_SELEX\| | | |
| CR936877.3_RXRG_1_SELEX\|CR936877.3_Rxrb_1_SELEX\|C | | |
| R936877.3_Rxra_1_SELEX\|HNF4G_HNF4A_4_SELEX\|HNF4 | | |
| _known19\|RXRA_known10\|RXRA_known12\|RXRB_1\|RXR | | |
| G_1\|RXRG_3\|RXRA_known14\|RXRB_2 | | |
| FOXP4_MA0481.1_ChIP-seq | CAAAAGTAAACAAAG | CTTTGTTTACTTTTG |
| THAP1_MA0597.1_ChIP-seq | CTGCCCGCA | TGCGGGCAG |
| TFAP2_known5 | CCGCCCCCAGGCC | GGCCTGGGGGCGG |
| EP300_disc2 | AAAGATGATGCAATA | TATTGCATCATCTTT |
| MYC_disc6 | AAGTCACGT | ACGTGACTT |
| TATA_disc5\|NRF1_disc2 | AAGCGGAA | TTCCGCTT |
| FOXO6_FOXO4_f1_HocoMoco | AATAAACAA | TTGTTTATT |
| POU6F2_POU6F2_2_SELEX\|POU6F2_2 | TTAATGAGCTAATTAA | TTAATTAGCTCATTAA |
| NKX6- | TAATTAAA | TTTAATTA |
| 3_Hgtx_Cell_FBgn0040318_B1H\|POU3F3_MA0197.1_B1H | | |
| \|TLX3_C15_SOLEXA_FBgn0004863_B1H\|SHOX_Otp_Cell_F | | |
| Bgn0015524_B1H\|NKX1- | | |
| 1_Slou_Cell_FBgn0002941_B1H\|HOXC5_MA0094.2_B1H\|L | | |
| MX1A_CG4328_SOLEXA_FBgn0036274_B1H\|RAX2_Repo_ | | |
| Cell_FBgn0011701_B1H\|LMX1A_CG32105_SOLEXA_FBgn0 | | |
| 052105_B1H\|HOXC5_Ubx_Cell_FBgn0003944_B1H\|NKX6- | | |
| 3_Hgtx_SOLEXA_FBgn0040318_B1H | | |
| TAL1_known4 | AGCAGCTGGA | TCCAGCTGCT |
| NR3C1_known11 | CTGTTCTTTC | GAAAGAACAG |
| AR_Ar_1_SELEX\|NR3C1_known17 | CGGTACACCGTGTACCC | GGGTACACGGTGTACC |
| | | G |
| MNX1_Hlxb9_3422_PBM | AAGCAATTAG | CTAATTGCTT |
| MITF_HLH30_PBM | TCACGTGA | TCACGTGA |
| NR2F2_NR2F6_1_SELEX\|NR2F2_Nr2f6_1_SELEX\|NR2F6_1\| | GAGGTCAAAAGGTCA | TGACCTTTTGACCTC |
| NR2F6_4 | | |
| STAT_disc7 | CTCTCCCTTTCCC | GGGAAAGGGAGAG |
| NKX2-3_2\|NKX2-3_3 | ACCACTTGAA | TTCAAGTGGT |
| NR2F2_NR2F1_1_SELEX\|HNF4_known23 | GAGGTCAAAGGTCAA | TTGACCTTTGACCTC |
| SIX5_Mv121_ChIP-seq\|SMARC_disc2 | ACTACAACTC | GAGTTGTAGT |
| ARID3C_Arid3a_3875_PBM | CAATTAAAA | TTTTAATTG |
| HNF4_known15 | CTTCAGGGGTCAATTGA | TCAATTGACCCCTGAAG |
| NKX2-5_Vnd_Cell_FBgn0003986_B1H\|NKX2- | CACTTGAAA | TTTCAAGTG |
| 5_MA0253.1_B1H | | |
| ZIC4_pTH2818_PBM | CCGGGGGGTC | GACCCCCCGG |
| EVX1_1 | AGAACTAATTAGTGGAC | GTCCACTAATTAGTTCT |
| NKX2-5_Mw138_ChIP-seq | AATCGATA | TATCGATT |
| SOX9_SOX9_4_SELEX\|SOX9_6 | ATGAATGTGCAGTCAT | ATGACTGCACATTCAT |
| VDR_VDR_f2_HocoMoco | GGGTCAACGAGTTCAC | GTGAACTCGTTGACCC |
| FOSL1_FOSL1_f2_HocoMoco | AACGTGACTCAGCA | TGCTGAGTCACGTT |
| ZSCAN4_1 | ACGTATGTGCACATCTG | CAGATGTGCACATACGT |
| GFI1B_MA0483.1_ChIP-seq | AAATCACAGCA | TGCTGTGATTT |
| SOX12_5ox12_3957_PBM | AAGAACAATG | CATTGTTCTT |
| ZBTB14_1 | AAGCGCGCCCCCG | CGGGGGCGCGCTT |
| PRDM 16_V$EVI1_02_Transfac\|RUNX1_3 | AGACAAGATAA | TTATCTTGTCT |
| NFATC1_NFATC1_3_SELEX\|NFATC1_3 | TTTTCCATGGAAAA | TTTTCCATGGAAAA |
| FOXD1_FOXJ3_3_SELEX\|FOXD1_Foxj3_4_SELEX\|FOXD1_F | GTAAACATAAACA | TGTTTATGTTTAC |
| OXJ2_3_SELEX\|FOXJ2_5\|FOXJ3_4\|FOXJ3_8 | | |
| ZNF410_Zfp410_3034_PBM | CCATCCCA | TGGGATGG |
| SPIC_Sfpi1_PBM | AAGGGGAAGT | ACTTCCCCTT |
| DBX1_1 | TAATTAATTAATAATTA | TAATTATTAATTAATTA |
| USF1_MA0093.2_ChIP- | GCCACGTGACC | GGTCACGTGGC |
| seq\|USF1_HepG2_USF1_HudsonAlpha_ChIP-seq | | |
| NKX3-1_MA0124.1_SELEX\|NKX3-1_2 | ATACTTA | TAAGTAT |
| NR2C2_Mv98_ChIP-seq | TCAGAGGTCA | TGACCTCTGA |
| IRX3_Caup_Cell_FBgn0015919_B1H | CAATAACA | TGTTATTG |
| LIN54_pTH9366_PBM | AATTTAAATT | AATTTAAATT |
| NR2E1::NFIC_1 | TGGCACCATGCCAA | TTGGCATGGTGCCA |
| FOXD1_MA0031.1_SELEX\|FOXD1_2 | ATGTTTAC | GTAAACAT |
| PRRX1_1 | AGTAGTTAATTAGTTAC | GTAACTAATTAACTACT |
| FOXO6_V$FOXO3_01_Transfac\|FOXO3_1 | TATGTAAACAACAA | TTGTTGTTTACATA |
| TP73_GSE18650_TP73_ChIP-seq | CATGTCGGGACATGC | GCATGTCCCGACATG |
| HNF1A_V$HNF1_C_Transfac\|HNF1_2 | AGTTAATTATTAACCAA | TTGGTTAATAATTAACT |
| SOX9_Sox10_2_SELEX\|SOX9_SOX10_3_SELEX\|SOX10_5\|S | ATCAATTGCAGTGAT | ATCACTGCAATTGAT |
| OX10_9 | | |
| FOXD1_HepG2_FOXA1_HudsonAlpha_ChIP-seq | CTAAGTAAACA | TGTTTACTTAG |
| HOXC5_HX68_do_HocoMoco | GCATTAATCAA | TTGATTAATGC |
| POU4F1_PO4F2_si_HocoMoco | CAGCTCATTAATA | TATTAATGAGCTG |
| ATF3_disc3 | AACCCGGCC | GGCCGGGTT |
| LHX3_3 | ATTATTTAATTAATTAC | GTAATTAATTAAATAAT |
| ZNF274_HeLa-53_ZNF274_UCD_ChIP-seq | TTCATACTGGAGAGAAA | TTTCTCTCCAGTATGAA |
| SMAD1_MA0535.1_ChIP-chip | CAGGCGCCGCCGCCG | CGGCGGCGGCGCCTG |
| CEBPA_V$CEBP_C12_Transfac\|CEBPB_known4 | ACATTGCATAATTA | TAATTATGCAATGT |
| SOX17_GSE19026_Sox17_XENcells_ChIP-seq | AAACAATGGAA | TTCCATTGTTT |
| NFYB_MA0502.1_ChIP-seq | AAATGGACCAATCAG | CTGATTGGTCCATTT |
| NKX6-1_2 | CGAAGTAATTAATTTTC | GAAAATTAATTACTTCG |
| SMAD2_5mad3_3805_PBM | ATTCCAGACA | TGTCTGGAAT |
| GCM1_pTH9283_PBM | ACCCGCATGA | TCATGCGGGT |
| CEBPB_known6 | AAATTTGGCAAA | TTTGCCAAATTT |
| CEBPA_2 | ATTGCGAAA | TTTCGCAAT |
| FOX_1 | GATTGTTTATTTA | TAAATAAACAATC |
| SRF_Mcm1_PBM | CGAATAGGGA | TCCCTATTCG |
| T_byn_FlyReg_FBgn0011723_B1H | AAGTGCGA | TCGCACTT |
| CTCF_disc10 | ACCTGCAGG | CCTGCAGGT |
| TFAP2_known6 | ACCGCCTGAGGGGAT | ATCCCCTCAGGCGGT |
| HOXC11_1 | CTATTTTACGACTTTA | TAAAGTCGTAAAATAG |
| ZNF524_ZNF524_1_SELEX\|ZNF524_1 | ACCCTCGAACCC | GGGTTCGAGGGT |
| NKX2-5_pTH2842_PBM | AAGCACTTAA | TTAAGTGCTT |
| BCL_discl | CACTTCCGGC | GCCGGAAGTG |
| LHX8_Lhx8_3_SELEX\|LHX8_4 | TAATTGCAATCA | TGATTGCAATTA |
| PAX2_PAX2_1_SELEX\|PAX2_4 | CGTCACGCTTGACTGCT | GAGCAGTCAAGCGTGA |
| | C | CG |
| LHX9_ap_FlyReg_FBgn0000099_B1H | TAATAA | TTATTA |
| KLF4_Klf12_1_SELEX\|KLF12_2 | AATAAGGGCGTGGTC | GACCACGCCCTTATT |
| LHX8_LHX6_2_SELEX\|LHX6_4 | TAATTAGCGCTAATTA | TAATTAGCGCTAATTA |
| MYC_disc10 | CCCCCCGCCTC | GAGGCGGGGGG |
| RORB_RORA_2_SELEX\|RORA_7 | TAACTAGGTTAGTAGGT | TGACCTACTAACCTAGT |
| | CA | TA |
| HDX_1 | AAGGCGAAATCATCGCA | TGCGATGATTTCGCCTT |
| TCF7L2_LEF1_f1_HocoMoco | ATCAAAG | CTTTGAT |
| HOXC9_Abd-B_FlyReg_FBgn0000015_B1H | TCATAAAA | TTTTATGA |
| PKNOX2_Hth_Cell_FBgn0001235_B1H\|TGIF1_Vis_Cell_FBg | TGACA | TGTCA |
| n0033748_B1H | | |
| BX088580.2_POU3F4_1_SELEX\|POU3F4_POU2F3_1_SELEX | ATTTGCATA | TATGCAAAT |
| \|BX088580.2_POU5F1P1_1_SELEX\|POU3F3_PO2F1_f1_Ho | | |
| coMoco\|POU2F2_P02F2_si_HocoMoco\|POU2F3_2\|POU3 | | |
| F4_2\|POU5F1_known4\|POU2F2_5 | | |
| VDR_Vdr_1_SELEX\|VDR_6 | GAGTTCATCGGGTTCA | TGAACCCGATGAACTC |
| TFAP2A_Tcfap2e_3713_PBM | CCTCAGGCGA | TCGCCTGAGG |
| CEBPG_CEBPG_si_HocoMoco | ATTTTGCAATCTG | CAGATTGCAAAAT |
| MYC_MCF-7_CMYC_UT-A_ChIP-seq | ACCACGTG | CACGTGGT |
| JUN_pTH5462_PBM\|AP1_known8 | ATGACTCAA | TTGAGTCAT |
| ZNF354C_MA0130.1_SELEX\|ZNF354C_1 | ATCCAC | GTGGAT |
| HOXC5_I$FTZ_01_Transfac | AAAGCAATTAAG | CTTAATTGCTTT |
| SHOX_Phox2b_3948_PBM\|LHX9_Ap_Cell_FBgn0000099_B | GCTAATTA | TAATTAGC |
| 1H\|LBX2_Lbl_Cell_FBgn0008651_B1H\|SHOX_Otp_3496_P | | |
| BM\|ALX1_Prrx1_3442_PBM\|SHOX_Phox2a_3947_PBM\|G | | |
| BX2_Gbx1_2883_PBM\|ALX1_Rx_Cell_FBgn0020617_B1H\| | | |
| EN2_En2_0952_PBM\|HOXD1_Hoxd1_3448_PBM | | |
| JUN_pTH8562_PBM\|ATF3_JDP2_3_SELEX\|JUN_JUN_f1_H | ATGACTCAT | ATGAGTCAT |
| ocoMoco\|ATF3_JDP2_1_SELEX\|ATF3_Jdp2_1_SELEX\|JDP2 | | |
| _2\|JDP2_4\|JDP2_6 | | |
| GCM_1 | AATGCGGGTGTG | CACACCCGCATT |
| FOXD1_V$FOXJ2_01_Transfac\|FOXJ2_1 | TTATAAATAAACATTCA | TTGAATGTTTATTTATAA |
| | A | |
| SPIC_Spic_PBM | AAGCGGAAG | CTTCCGCTT |
| TBPL2_TBP_f1_HocoMoco | GAATTTATACC | GGTATAAATTC |
| FIGLA_pTH5105_PBM | ACCACCTGG | CCAGGTGGT |
| ZSCAN4_2 | TACATGTGCACATAAAA | TTTTATGTGCACATGTA |
| ZNF143_MA0088.1_COMPILED | GATTTCCCATCATGCCTT | GCAAGGCATGATGGGA |
| | GC | AATC |
| ZNF333_ZN333_f1_HocoMoco | CGATAATGA | TCATTATCG |
| SHOX_V$S8_01_Transfac | AGGTTAATTGAGTAAA | TTTACTCAATTAACCT |
| KLF4_pTH9072_PBM | CCACGCCCA | TGGGCGTGG |
| ZFY_pTH2933_PBM | TAGGCCACA | TGTGGCCTA |
| RHOXF1_RHOXF1_3_SELEX\|RHOXF1_RHOXF1_1_SELEX\|RH | GGATAATCC | GGATTATCC |
| OXF1_3\|RHOXF1_5 | | |
| DPRX_DPRX_2_SELEX\|DPRX_2 | GGGATAATCCC | GGGATTATCCC |
| ENSG00000250542_pTH5459_PBM | AAACGTAG | CTACGTTT |
| SOX13_pTH3862_PBM | ATTGTTTTG | CAAAACAAT |
| SOX15_Sox15_3457_PBM | ATTGTTTTA | TAAAACAAT |
| THAP1_K562_THAP1_HudsonAlpha_ChIP-seq | CGCCATCTTGGATGAGG | CTGCCCTCATCCAAGAT |
| | GCAG | GGCG |
| HSF1_HSF1_f2_HocoMoco | AGAAAGTTCTAGAA | TTCTAGAACTTTCT |
| LHX9_LHX2_f1_HocoMoco | CACTTTTAATTAG | CTAATTAAAAGTG |
| MEF2B_MA0497.1_ChIP-seq | ATGCTAAAAATAGAA | TTCTATTTTTAGCAT |
| ATF3_known13 | CGATGACGTCA | TGACGTCATCG |
| ELF3_Elf5_1_SELEX\|ELF3_ELF5_1_SELEX\|ELF3_ELF5_2_SEL | ACCCGGAAGTA | TACTTCCGGGT |
| EX\|ELF5_2\|ELF5_3\|ELF5_4 | | |
| HOXC10_MA0485.1_ChIP-seq | GGCCATAAATCAC | GTGATTTATGGCC |
| ELF1_K562_ELF1_HudsonAlpha_ChIP-seq | ACCCGGAAGTG | CACTTCCGGGT |
| GBX2_GBX2_2_SELEX\|GBX2_3 | TAATTGGCCAATTA | TAATTGGCCAATTA |
| MYCN_MYCN_si_HocoMoco\|MXI1_Mv94_ChIP-seq | CCACGTGG | CCACGTGG |
| HSF_known2 | GAAACCTCTGGAA | TTCCAGAGGTTTC |
| SOX30_Sox30_2781_PBM | ATTGTTCTGC | GCAGAACAAT |
| SRF_YMR043W_831_DeBoer11 | CATTTCCGAATTGGGAA | TGTTTCCCAATTCGGAA |
| | ACA | ATG |
| NKX2-5_3 | TCAAGTGGGA | TCCCACTTGA |
| SNAI2_SNAI2_1_SELEX\|SNAI2_1 | AACAGGTGT | ACACCTGTT |
| NFKB1_V$NFKB_Q6_Transfac\|NFKB_known4 | AGGGGAATTTCCCC | GGGGAAATTCCCCT |
| DRGX_Otx1_2_SELEX\|DRGX_OTX1_2_SELEX\|OTX1_3\|OTX | CGGATTAA | TTAATCCG |
| 1_5 | | |
| FOXD1_FOXC2_f1_HocoMoco | GTTTGTTTTGCCAGA | TCTGGCAAAACAAAC |
| ETV5_Elk3_1_SELEX\|ETV5_GABPA_1_SELEX\|ETV5_ELK3_1 | ACCGGAAGTA | TACTTCCGGT |
| _SELEX\|ETV5_ELK1_2_SELEX\|ETV5_ELK1_1_SELEX\|ETV5_E | | |
| TV4_1_SELEX\|ETV5_ETV1_1_SELEX\|ETS1_V$CETS1P54_01 | | |
| Transfac\|ETS_known3\|ETS_known11\|ETS_known12\|ELK | | |
| 3_1\|ETV1_1\|ETV4_2\|ELK3_2\|ETS_known18 | | |
| LHX4_1 | CAAAGCTAATTAGTTTA | TAAACTAATTAGCTTTG |
| POU4F3_1 | AGTTATTAATGAGGTC | GACCTCATTAATAACT |
| ETS1_ETS1_3_SELEX\|ENSG00000235187_ETV3_1_SELEX\|E | ACCGGAAGTG | CACTTCCGGT |
| TV5_ERG_1_SELEX\|ETV5_ELK4_1_SELEX\|ETV5_ETV5_1_SE | | |
| LEX\|EN5G00000235187_ERF_1_SELEX\|ETV5_ELK1_4_SELE | | |
| X\|ETV5_FLI1_3_SELEX\|ETV5_ERG_3_SELEX\|ETS1_ETS1_1_ | | |
| SELEX\|ELF1_ELF1_g_HocoMoco\|ETV5_FEV_1_SELEX\|ETV | | |
| 5_FLI1_1_SELEX\|ETS_disc2\|EGR1_disc2\|ELK4_2\|ERF_1\|ER | | |
| G_1\|ERG_3\|ETS_known14\|ETS_known16\|ETV3_1\|ETV5_1 | | |
| \|FEV_2\|FLI1_1\|FLI1_3 | | |
| AP1_known10 | TGACTCA | TGAGTCA |
| TFCP2_TFCP2_f1_HocoMoco | GCCTGAACTGGCCAGA | TCTGGCCAGTTCAGGC |
| DBX2_Dbx2_3487_PBM\|DLX1_Dlx5_3419_PBM | GCAATTA | TAATTGC |
| BHLHE40_BHE41_f1_HocoMoco | ACCGGGTCACGTGCAG | GCTTCTGCACGTGACCC |
| | AAGC | GGT |
| EHF_1 | AGGACCCGGAAGTAA | TTACTTCCGGGTCCT |
| NHLH2_HLH4C_SANGER_5_FBgn0011277_B1H | GGCACCAGCTGCGCC | GGCGCAGCTGGTGCC |
| HOXB2_HXA1_f1_HocoMoco | CATCCATCAA | TTGATGGATG |
| BX088580.2_POU5F1P1_2_SELEX\|POU3F4_POU2F3_2_SEL | ATGAATATGCAA | TTGCATATTCAT |
| EX\|POU2F3_3\|POU5F1_known5 | | |
| E2F_known15 | CGCGCC | GGCGCG |
| STAT1_Mv124_ChIP-seq | TTCCCGGAAA | TTTCCGGGAA |
| BRCA1_MA0133.1_SELEX\|BRCA1_known2 | ACAACAC | GTGTTGT |
| ETS_1 | AACCACTTCCTG | CAGGAAGTGGTT |
| IRF5_IRF5_1_SELEX\|IRF_known15 | AGTTTCGGTTTCGG | CCGAAACCGAAACT |
| IRF8_IRF8_2_SELEX\|IRF_known20 | AGTTTCGGTTTCGA | TCGAAACCGAAACT |
| CDX2_V$CDXA_02_Transfac | ATTAATA | TATTAAT |
| TAL2_TAL1_f2_HocoMoco | AACAGATGGTCGCCCAA | TCCAGTGGTTGGGCGAC |
| | CCACTGGA | CATCTGTT |
| FOXA_disc2 | AATATTGACA | TGTCAATATT |
| SP2_disc3 | AAGGGGCGGG | CCCGCCCCTT |
| MAX_NB4_MAX_Stanford_ChIP-seq | CCACGTGATCC | GGATCACGTGG |
| ATF4_1 | CATTGCGTCAGG | CCTGACGCAATG |
| SP9_V$SP1_C16_Transfac\|SP1_known2 | GGCCCCGCCCCCC | GGGGGGCGGGGCC |
| HOXB13_HOXA13_4_SELEX\|HOXA13_5 | TCTCGTAAAAA | TTTTTACGAGA |
| GATA2_srp_SANGER_5_FBgn0003507_B1H | CCTTATCA | TGATAAGG |
| NEUROG1_tap_da_SANGER_5_2_FBgn0015550_B1H\|TCF4 | CCAGATGTCA | TGACATCTGG |
| _tap_da_SANGER_5_2_FBgn0000413_B1H | | |
| FOXO6_V$FOXO4_02_Transfac\|FOXO4_2 | AACGTAAACAACAT | ATGTTGTTTACGTT |
| GATA_known17 | ATCTTCTTATCAGTTTA | TAAACTGATAAGAAGAT |
| MYBL2_MYBL2_2_SELEX\|MYBL2_2 | ACCGTTAAAACCGTTA | TAACGGTTTTAACGGT |
| WT1_WT1_f1_HocoMoco | CCCCCGCCCCCGC | GCGGGGGCGGGGG |
| SOX13_1 | AAATTATTGTTCTTAA | TTAAGAACAATAATTT |
| SNAI2_SNAI2_f1_HocoMoco | CACCTGG | CCAGGTG |
| TBX3_TBX2_1_SELEX\|MGA_MGA_3_SELEX\|MGA_3\|TBX2_ | GGTGTGAAATTTCACAC | GGTGTGAAATTTCACAC |
| 1 | C | C |
| E2F8_E2F8_1_SELEX\|E2F8_1 | TTTCCCGCCAAA | TTTGGCGGGAAA |
| TCF4_nau_da_SANGER_5_FBgn0000413_B1H\|MYOD1_na | CACCTGTC | GACAGGTG |
| u_da_SANGER_5_FBgn0002922_B1H | | |
| CEBPZ_CEBPZ_si_HocoMoco | AGCCAATCAGC | GCTGATTGGCT |
| ATF1_pTH5080_PBM | GTGACGTAA | TTACGTCAC |
| ATF1_V$CREB_C14_Transfac\|ATF3_known7 | GGTGACGTAACC | GGTTACGTCACC |
| RAD21_disc8 | CACCAGGGGGCAGC | GCTGCCCCCTGGTG |
| OBOX2_1\|OBOX3_1 | ATAGTTAATCCCCCTCA | TGAGGGGGATTAACTAT |
| SRY_V$SRY_02_Transfac\|SRY_2 | GTAAACAATAGA | TCTATTGTTTAC |
| ZBTB33_disc3 | AACTCTCGCG | CGCGAGAGTT |
| HOXD12_HOXD12_2_SELEX\|HOXD12_3 | AGTCGTAAAAA | TTTTTACGACT |
| BACH1_Mv47_ChIP-seq | AAATGCTGA | TCAGCATTT |
| EN2_1 | TGCACTAATTAGTGGAA | TTCCACTAATTAGTGCA |
| SOX3_2 | AATCAATAACATTGATC | GATCAATGTTATTGATT |
| SRY_SRY_f1_HocoMoco | AAAACAAAA | TTTTGTTTT |
| ZNF281_1 | GGGGGGGGGGGGGGA | TCCCCCCCCCCCCCC |
| SP2_disc2 | ATTGGCCAGCGTGGCTG | TGACTGACAGCCACGCT |
| | TCAGTCA | GGCCAAT |
| SP9_SP8_1_SELEX\|SP8_1 | AGTGGGCGTGGC | GCCACGCCCACT |
| SPDEF_Spdef_PBM | AAACCGGATA | TATCCGGTTT |
| ESRRA_disc3 | AAGGTGACCT | AGGTCACCTT |
| CDX2_MA0216.2_ChIP-chip | GGCCATAAAAA | TTTTTATGGCC |
| SCRT2_SCRT1_1_SELEX\|SCRT1_1 | AACCACCTGTTGCTC | GAGCAACAGGTGGTT |
| NANOGP1_pTH5685_PBM | AGCGATTAA | TTAATCGCT |
| HNF4G_Hnf4a_2640_PBM | AGGGTTCAAA | TTTGAACCCT |
| ESRRG_ESRRB_1_SELEX\|ESRRB_2 | TATGACCTTGA | TCAAGGTCATA |
| PAX6_2 | CTGACCTGGAACTC | GAGTTCCAGGTCAG |
| ESR2_Mv66_ChIP-seq | AGGTCAGGGTGACCTG | TCCAGGTCACCCTGACC |
| | GA | T |
| SRF_pTH5539_PBM | CCAAATCGGG | CCCGATTTGG |
| SP9_SP3_f1_HocoMoco | CCCCGGCCCCGCCCCCC | GGGGGGGGGCGGGGC |
| | CCC | CGGGG |
| TFAP2A_Tcfap2a_1_SELEX\|TFAP2A_TFAP2A_1_SELEX\|TFA | TGCCCCCGGGCA | TGCCCGGGGGCA |
| P2_known11\|TFAP2_known20 | | |
| ETV5_ETV4_f1_HocoMoco | ACTTCCTG | CAGGAAGT |
| TFAP2_known7 | ACCGCCTCAGGCGGT | ACCGCCTGAGGCGGT |
| ETS_2 | ACTTCCTC | GAGGAAGT |
| NR2E3_NR2E3_f1_HocoMoco | AAAGTCAAAAGTCA | TGACTTTTGACTTT |
| PAX6_PAX6_f1_HocoMoco | TCAAGCGTGAA | TTCACGCTTGA |
| TCF7L1_1\|TCF7_1 | TATAGATCAAAGGAAAA | TTTTCCTTTGATCTATA |
| JUN_H1-hESC_CJUN_Stanford_ChIP-seq | CATTCCTGAGGGATGAC | TAAGTCATCCCTCAGGA |
| | TTA | ATG |
| DMRTA2_pTH10777_PBM | ACTGTATCAA | TTGATACAGT |
| NR2C2_NR2C1_si_HocoMoco | CTGACCTCTGGCC | GGCCAGAGGTCAG |
| RORB_RORG_f1_HocoMoco | AAAAGTAGGTCAG | CTGACCTACTTTT |
| ESRRG_ESRRA_4_SELEX | TTCAAGGTCAA | TTGACCTTGAA |
| TFAP4_pTH5067_PBM | ATCAGCTGG | CCAGCTGAT |
| GMEB1_pTH8671_PBM | TACGTCA | TGACGTA |
| NFE2L1_1 | CTTCCAAAATGAC | GTCATTTTGGAAG |
| RELA_V$NFKAPPAB65_01_Transfac\|RELA_MA0107.1_SELE | GGAAATTCCC | GGGAATTTCC |
| X\|NFKB_disc1\|NFKB_known2\|NFKB_known3\|NFKB_know | | |
| n7\|NFKB_known9 | | |
| ELF3_ELF5_f1_HocoMoco | ATAAGGAAGTA | TACTTCCTTAT |
| TFAP4_HLH11_PBM | ATCAGCTGA | TCAGCTGAT |
| POU4F1_POU4F1_1_SELEX\|POU4F1_1 | ATGAATAATTAATG | CATTAATTATTCAT |
| FEV_1 | ATTTCCTG | CAGGAAAT |
| XBP1_XBP1_2_SELEX\|XBP1_4 | AATGCCACGTCATC | GATGACGTGGCATT |
| POU3F3_PO3F2_si_HocoMoco | ATTATTTATG | CATAAATAAT |
| OTX_1 | AATTAATC | GATTAATT |
| SOX9_MA0077.1_SELEX\|SOX9_SOX9_1_SELEX\|SOX9_2\|SO | CCATTGTTC | GAACAATGG |
| X9_3 | | |
| SOX3_3 | CATGAATACCATTCATC | GATGAATGGTATTCATG |
| NKX1-1_1 | TCCCACTAATTAGCGCA | TGCGCTAATTAGTGGGA |
| NKX6-2_1 | GAAATAATTACC | GGTAATTATTTC |
| KLF4_KLF8_f1_HocoMoco | CACCCCCTG | CAGGGGGTG |
| ZNF423_2 | GCACCCCTGGGTGCC | GGCACCCAGGGGTGC |
| GATA2_Mw144_ChIP-seq | AGATGCTTATC | GATAAGCATCT |
| NFKB1_V$NFKAPPAB50_01_Transfac\|NFKB_known1 | GGGAATCCCC | GGGGATTCCC |
| CTCF_HEK293_CTCF_UW_ChIP- | GGCGCCCCCTGGTGGCC | TGGCCACCAGGGGGCG |
| seq\|CTCF_K562_CTCF_Broad_ChIP- | A | CC |
| seq\|CTCF_HBM EC_CTCF_UW_ChIP-seq | | |
| ALX1_VSX2_si_HocoMoco | TAATTAGCTAA | TTAGCTAATTA |
| VAX1_1 | ACGTTAATTAACCCAG | CTGGGTTAATTAACGT |
| ETV5_Etv1_PBM\|ETV5_Etv4_PBM\|ETV5_Gm5454_PBM | ACTTCCGGTC | GACCGGAAGT |
| AP1_disc3 | ATGAGTCACC | GGTGACTCAT |
| HOXA4_pTH5479_PBM | CTTAATTACC | GGTAATTAAG |
| EGR3_MA0472.1_ChIP-seq | CCCCCGCCCACGCAC | GTGCGTGGGCGGGGG |
| NKX2-2_2 | AATTTTCAAGTGGTTAA | TTAACCACTTGAAAATT |
| TCF4_pTH3866_PBM\|TCF12_HTF4_f1_HocoMoco | ACACCTGCT | AGCAGGTGT |
| SPDEF_SPDEF_2_SELEX\|SPDEF_3 | ATAATCCGGGACCAC | GTGGTCCCGGATTAT |
| DLX4_1 | GTCGGTAATTATAGCGA | TCGCTATAATTACCGAC |
| AIRE_1 | ATTTAACCATTATAACCA | TTATTAATTGGTTATAAT |
| | ATTAATAA | GGTTAAAT |
| NFAT5_NFAT5_f1_HocoMoco | CATGGAGTTTTCCAC | GTGGAAAACTCCATG |
| POU3F3_1 | AAAATATGCATAATAAA | TTTATTATGCATATTTT |
| MESP2_MESP1_1_SELEX\|MESP1_1 | AACACCTGTG | CACAGGTGTT |
| SIN3A_disc6 | CCGCTCAGCCGC | GCGGCTGAGCGG |
| NKX2-8_2 | CCACTTGAG | CTCAAGTGG |
| ESRRA_disc4 | CAGGGTCAGAGCGG | CCGCTCTGACCCTG |
| RARG_Rarb_2_SELEX\|RARB_2 | AAAGGTCACCAGAGGT | TGACCTCTGGTGACCTT |
| | CA | T |
| HSF2_pTH9010_PBM | ATATAGAACATTC | GAATGTTCTATAT |
| GATA2_K562b_GATA2_UCD_ChIP-seq | CCTTATCTGCCCCCCCCA | TGGGGGGGGCAGATAA |
| | | GG |
| ZNF148_GSE11329_zfp281_ChIP- | CCCCTCCCCCACCCC | GGGGTGGGGGAGGGG |
| seq\|ZNF148_ZN148_si_HocoMoco | | |
| CEBPA_CEBPD_f1_HocoMoco | AATTGTGCAAT | ATTGCACAATT |
| HOMEZ_HOMEZ_LSELEX\|HOMEZ_2 | AAAACGATTATA | TATAATCGTTTT |
| ISL2_ISL1_f1_HocoMoco | CATTAAC | GTTAATG |
| ATF7_ATF7_1_SELEX\|ATF7_1 | CGATGACGTCATCG | CGATGACGTCATCG |
| HOXA4_HOXA2_1_SELEX\|EMX2_pTH5677_PBM\|HOXA2_2 | CCTAATTACC | GGTAATTAGG |
| CR936877.3_Rxra_2_SELEX\|RXRA_known15 | GGGTCATGACCC | GGGTCATGACCC |
| STAT_known15 | GACTTTTCTGGGA | TCCCAGAAAAGTC |
| GATA2_PBDE_GATA1_UCD_ChIP-seq | CTGGGGGGGGCAGATA | CTTATCTGCCCCCCCCAG |
| | AG | |
| GATA2_K562_GATA2_HudsonAlpha_ChIP-seq | CTGGTGGGGGCAGATA | CTTATCTGCCCCCACCA |
| | AG | G |
| TRIM28_disc1 | TGAGTCATCA | TGATGACTCA |
| EWSR1::FLI1_1 | CCTTCCTTCCTTCCTTCC | GGAAGGAAGGAAGGAA |
| | | GG |
| ARNT2_BMAL1_f1_HocoMoco | GGGTCACGTGTCCA | TGGACACGTGACCC |
| SP9_SP1_1_SELEX\|SP1_known8 | ACCCCGCCCCC | GGGGGCGGGGT |
| PAX9_Mv109_ChIP-seq | AGCGTGACCG | CGGTCACGCT |
| STAT4_STAT4_si_HocoMoco | CTTTTCTGGGAAA | TTTCCCAGAAAAG |
| CEBPB_known7 | AAATTGTGCAAT | ATTGCACAATTT |
| ARNT2_tgo_sima_SANGER_5_FBgn0015014_B1H | GTACGTGAC | GTCACGTAC |
| ENSG00000250096_RUNX2_1_SELEX\|ENSG00000250096_ | TAACCGCAAACCGCAA | TTGCGGTTTGCGGTTA |
| RUNX3_1_SELEX\|RUNX2_4\|RUNX3_1 | | |
| POU3F1_1\|POU3F4_1 | AATTAATTAATTAATTC | GAATTAATTAATTAATT |
| EP300_disc9 | CCGCTCCCAGCGGCTGC | GCAGCCGCTGGGAGCG |
| | | G |
| HOXC5_Mw154_ChIP-seq | CATCAATC | GATTGATG |
| TFAP4_crp_SANGER_10_FBgn0001994_B1H | ATCAGCTGGTC | GACCAGCTGAT |
| CR936877.3_HepG2_RXRA_HudsonAlpha_ChIP-seq | CCCTGACCTTTGCCC | GGGCAAAGGTCAGGG |
| PLAG1_PLAG1_si_HocoMoco | AGAGGGGGCCCTA | TAGGGCCCCCTCT |
| NR2C2_K562b_TR4_UCD_ChIP-seq | AGTACTTCCGGGTCA | TGACCCGGAAGTACT |
| PAX5_pTH10794_PBM | ACGCGTGACG | CGTCACGCGT |
| E2F_disc6 | AGATTTGAAT | ATTCAAATCT |
| RUNX1_V$AML1_01_Transfac\|RUNX2_1\|RUNX1_7 | ACCACA | TGTGGT |
| SOX8_1 | TAAAGAACAATAGATAA | TTATCTATTGTTCTTTA |
| AP1_disc7 | CATGACTCAGAC | GTCTGAGTCATG |
| SOX1_MA0143.3_ChIP-seq\|SOX11_Sox4_PBM | AACAAAGG | CCTTTGTT |
| JUN _JUND_f1_HocoMoco\|JUN_HeLa- | GATGACTCATC | GATGAGTCATC |
| S3_CJUN_Stanford_ChIP- | | |
| seq\|JUN_K562_CJUN_Stanford_ChIP-seq | | |
| PAX3_1 | AAATTTCGTCACGGTTA | ACCTTAACCGTGACGAA |
| | AGGT | ATT |
| RFX8_RFX5_2_SELEX\|RFX8_RFX5_3_SELEX\|RFX5_known9 | CGTTACCATGGCAACG | CGTTGCCATGGTAACG |
| BATF_GM12878_BATF_HudsonAlpha_ChIP-seq | TCTCGATATGACTCA | TGAGTCATATCGAGA |
| NR1H_1 | TGACCGCCAGTGACCCC | TGGGGTCACTGGCGGTC |
| | A | A |
| RFX8_MA0365.1_PBM,\|RFX8_YLR176C_496_DeBoer11 | GGTTGCCA | TGGCAACC |
| PTF1A_1 | GCTGTGGTTTTCCC | GGGAAAACCACAGC |
| ZNF423_V$ROAZ_01_Transfac\|ZNF423_1 | GCACCCAAGGGTGC | GCACCCTTGGGTGC |
| TFAP2A_TFAP2A_3_SELEX\|TFAP2_known13 | TGCCCCCGGGGCA | TGCCCCGGGGGCA |
| TFAP2A_HeLa-S3_AP2GAMMA_UCD_ChIP-seq | AGCCTCAGGGCATGG | CCATGCCCTGAGGCT |
| NR2F2_COT1_f1_HocoMoco | GGTCAAAGGTCA | TGACCTTTGACC |
| AHR_1 | CCCCCGGCTAGCGTGAG | TCTCACGCTAGCCGGGG |
| | A | G |
| ARID5A_pTH4426_PBM | CAATATCG | CGATATTG |
| RFX8_pTH3516_PBM | CCATAGCAAC | GTTGCTATGG |
| FOXD1_V$XFD3_01_Transfac | TGAGTAAACAAAAA | TTTTTGTTTACTCA |
| GATA_disc3 | GCAGGAAATGA | TCATTTCCTGC |
| RXRA_known3 | AGAGTTCA | TGAACTCT |
| YBX1_pTH8991_PBM | TAGGATAGA | TCTATCCTA |
| TATA_disc8 | CGGAAGTCGC | GCGACTTCCG |
| SHOX2_1 | CACAATTAATTAACGCG | CGCGTTAATTAATTGTG |
| DRGX_Otx1_1_SELEX\|DRGX_OTX1_1_SELEX\|OTP_OTX2_1 | GTTAATCCGATTAAC | GTTAATCGGATTAAC |
| _SELEX\|OTX1_2\|OTX2_2\|OTX1_4 | | |
| SP1_known3 | AGCCTTGGGGAGGG | CCCTCCCCAAGGCT |
| DLX1_Dlx4_3488_PBM | ATAATTGC | GCAATTAT |
| DMBX1_Pax7_3783_PBM | ATAATTGG | CCAATTAT |
| POU3F2_1 | GCCATCCAAAATGAAC | GTTCATTTTGGATGGC |
| CEBPA_MA0102.3_ChIP-seq | ATTGCACAATA | TATTGTGCAAT |
| MEIS1::HOXA9_1 | TCGTAAAACTGTCA | TGACAGTTTTACGA |
| MYBL1_MYBL1_4_SELEX\|MYBL1_5 | GGCCGTTATAACCGTTA | TAACGGTTATAACGGCC |
| MSX2_2 | AAATTAATTGGTTTTG | CAAAACCAATTAATTT |
| SOX4_1 | AGAAGAACAAAGGACT | TAGTCCTTTGTTCTTCT |
| | A | |
| MYC_HeLa-53_CMYC_Stanford_ChIP- | CCACGTGCTC | GAGCACGTGG |
| seq\|MAX_K562_MAX_HudsonAlpha_ChIP-seq | | |
| RXRA_known4 | GGAGTTCA | TGAACTCC |
| ZNF219_1 | CGCCCCCCCCCC | GGGGGGGGGGCG |
| PBX1_3 | ACATCAATCAAA | TTTGATTGATGT |
| BCL6B_Bcl6b_0961_PBM | GTCTTTCTAGAA | TTCTAGAAAGAC |
| GATA2_SH-SY5Y_GATA2_UCD_ChIP-seq | CAGATAAGAA | TTCTTATCTG |
| HMX1_HMX2_1_SELEX\|HMX2_2 | ACCAATTAAAA | TTTTAATTGGT |
| HOXA4_2 | CAAGTTAATTAATAATC | GATTATTAATTAACTTG |
| HNF1A_Tcf1_2666_PBM | CCTGGTTAA | TTAACCAGG |
| ZBTB14_2 | CCGCGCGC | GCGCGCGG |
| OBOX6_1 | AAAAACGGATTATTG | CAATAATCCGTTTTT |
| CTCF_disc3 | ACTAGAGGG | CCCTCTAGT |
| ENSG00000234254_TG\|F1_si_HocoMoco | CTGTCAC | GTGACAG |
| SOX9_SOX9_6_SELEX\|SOX9_8 | AATCAATTTCAGTGATT | AATCACTGAAATTGATT |
| PKNOX2_Meis2_1_SELEX\|PKNOX2_MEIS1_1_SELEX\|PKNO | CTGTCAA | TTGACAG |
| X2_Meis3_1_SELEX\|MEIS1_4\|MEIS2_3\|MEIS3_4 | | |
| TFAP2A_TFAP2C_5_SELEX\|TFAP2A_Tcfap2a_3_SELEX\|TFA | TGCCCTCAGGGCA | TGCCCTGAGGGCA |
| P2A_TFAP2B_3_SELEX\|TFAP2A_TFAP2A_6_SELEX\|TFAP2A | | |
| TFAP2C_3_SELEX\|TFAP26_4\|TFAP2_known16\|TFAP2_kn | | |
| own18\|TFAP2_known22 | | |
| SIX6_Six6_2267_PBM | GGTATCA | TGATACC |
| ALX1_Al_SOLEXA_FBgn0000061_B1H | CGCTAATTA | TAATTAGCG |
| FOXO6_MA0480.1_ChIP-seq | TCCTGTTTACA | TGTAAACAGGA |
| NFATC2_1 | TGGAAAA | TTTTCCA |
| FOXP1_1 | ATAAAAAACAACACAAA | TTATTTGTGTTGTTTTTT |
| | TAA | AT |
| EN2_en_SOLEXA_2_FBgn0000577_B1H | CTAATTAAGA | TCTTAATTAG |
| E2F2_E2F2_2_SELEX\|E2F2_3 | AATTTTGGCGCCAAAAT | CATTTTGGCGCCAAAAT |
| | G | T |
| HINFP_HINFP1_1_SELEX\|HINFP_2 | CAACGTCCGCGG | CCGCGGACGTTG |
| USF1_GM12878_USF2_Stanford_ChIP-seq | CCGGGCCACGTGACC | GGTCACGTGGCCCGG |
| ETV5_pTH6345_PBM\|ETV5_pTH6450_PBM\|EP300_disc4 | ACTTCCGG | CCGGAAGT |
| CCNT2_disc2 | CCCCACCCCC | GGGGGTGGGG |
| HOXA6_1 | AAGGTAATTACCTAAT | ATTAGGTAATTACCTT |
| SMARCC1_HeLa-S3_BAF155_Stanford_ChIP-seq | GATGAGTCACCCCCC | GGGGGGTGACTCATC |
| ISX_1 | ACGACTAATTAGGAGT | ACTCCTAATTAGTCGT |
| HINFP_H\|NFP1_3_SELEX\|HINFP_4 | GCGGACGTTCAACGTCC | GCGGACGTTGAACGTCC |
| | GC | GC |
| ATF1_V$CREB_02_Transfac\|ATF3_known3 | CGGGTGACGTCC | GGACGTCACCCG |
| ZNF384_ZN384_f1_HocoMoco | CCGATTTTTTCC | GGAAAAAATCGG |
| FOXD1_pTH3802_PBM | AATGTAAACATA | TATGTTTACATT |
| E2F_known2\|E2F_known3\|E2F_known4\|E2F_known5\|E2 | GCGCGAAA | TTTCGCGC |
| F_known6\|E2F_known8\|E2F_known12\|E2F_known14 | | |
| KLF15_KLF15_a_HocoMoco | GCCCCCACCTCCCCGCC | GGCGGGGAGGTGGGG |
| | | GC |
| REST_HeLa-S3_NRSF_HudsonAlpha_ChIP-seq | AGCACCATGGACAGCG | CGCTGTCCATGGTGCT |
| DDIT3::CEBPA_2 | AGATGCAATCCC | GGGATTGCATCT |
| REST_K562_NRSF_HudsonAlpha_ChIP-seq | CTGTCCATGGTGCTGA | TCAGCACCATGGACAG |
| HOXD12_HOXD12_3_SELEX\|HOXC10_HOXC11_3_SELEX\|H | ATTTTACGACC | GGTCGTAAAAT |
| OXC10_HOXC11_1_SELEX\|HOXC11_2\|HOXC11_4 | | |
| POU3F3_V$OCT1_04_Transfac | TCTTTTAATTTGCATAAT | TTATGATTATGCAAATT |
| | CATAA | AAAAGA |
| CTCF_disc9 | GCCCACTAGAGGGCAC | GTGCCCTCTAGTGGGC |
| CEBPA_V$CEBP_C_Transfac\|CEBPB_known5 | GGTATTTGGCAATGCAC | TGTGCATTGCCAAATAC |
| | A | C |
| HNF4_known11 | GGGGCA | TGCCCC |
| FOXD1_FOXI1_1_SELEX\|FOXD1_Foxg1_3_SELEX\|FOXD1_F | GTAAACA | TGTTTAC |
| oxk1_2_SELEX\|FOXD1_bin_SANGER_5_FBgn0045759_B1H | | |
| \|FOXO6_FOXO6_2_SELEX\|FOXD1_FOXD3_2_SELEX\|FOXD1 | | |
| _FOXL1_1_SELEX\|FOXD1_FOXD2_2_SELEX\|FOXO6_FOXO4 | | |
| _2_SELEX\|KIAA0415_MA0297.1_PBM,\|FOXP3_FOXP3_1_S | | |
| ELEX\|FOXD2_2\|FOXD3_4\|FOXI1_3\|FOXL1_4\|FOXO4_4\|F | | |
| OXO6_2\|FOXP3_2\|FOXG1_5\|FOXK1_4 | | |
| ZIC4_V$ZIC1_01_Transfac\|ZIC4_ZIC3_f1_HocoMoco\|ZIC4_ | GACCACCCA | TGGGTGGTC |
| V$Z1C3_01_Transfac\|ZIC1_1\|ZIC3_1 | | |
| SIX5_known5 | ATAAATGACACCTATCA | TGATAGGTGTCATTTAT |
| ZIC4_V$Z1C2_01_Transfac\|ZIC4_ZIC1_f1_HocoMoco\|ZIC4_ | GACCACCCC | GGGGTGGTC |
| ZIC2_f1_HocoMoco\|ZIC2_1 | | |
| TFAP2_known1 | CGCCCGCCGGCG | CGCCGGCGGGCG |
| TEF_TEF_f1_HocoMoco | CATTTACATAAACA | TGTTTATGTAAATG |
| HOXA7_pTH6498_PBM | AAGTAATTACT | AGTAATTACTT |
| AR1D3A_2 | GAATTTTAATTAAACCC | GGGTTTAATTAAAATTC |
| STAT6_MA0520.1_ChIP-seq | ATTTCTCAGGAAATG | CATTTCCTGAGAAAT |
| HIC1_2 | GAGGGGTGCCCGCAGG | GGCCTGCGGGCACCCCT |
| | CC | C |
| IRF_known6 | AAGTGAA | TTCACTT |
| HOXC5_I$DFD_01_Transfac | ACCAAGTAATTCCTAG | CTAGGAATTACTTGGT |
| TCF4_pTH5101_PBM | CACACCTGG | CCAGGTGTG |
| SP9_SP2_si_HocoMoco | GAGGGGGGCGGGGCTA | TTAGCCCCGCCCCCCTC |
| | A | |
| THRB_THRA_1_SELEX\|THRA_1 | GTGACCTCATAAGGTCA | GTGACCTTATGAGGTCA |
| | C | C |
| GBX1_1 | TACACTAATTAGTGGCA | TGCCACTAATTAGTGTA |
| BPTF_1 | AACCACAACACATA | TATGTGTTGTGGTT |
| SIX2_So_Cell_FBgn0003460_B1H | AATGATA | TATCATT |
| STAT6_V$STAT6_02_Transfac\|STAT_known14 | AGGAAGTC | GACTTCCT |
| ELF3_MA0598.1_ChIP-seq | CAGGAAGG | CCTTCCTG |
| PRDM1_PRDM1_a_HocoMoco | GAAAGTGAAAGTGA | TCACTTTCACTTTC |
| DBP_1 | AGCAAAC | GTTTGCT |
| FOXA_disc4 | AAATTCCT | AGGAATTT |
| ZEB1_V$DELTAEF1_01_Transfac | TCTCACCTGAA | TTCAGGTGAGA |
| CTCF_HUVEC_CTCF_Broad_ChIP-seq | CCCGGCGCCCCCTGGTG | CGGCCACCAGGGGGCG |
| | GCCG | CCGGG |
| AR_AR_2_SELEX\|NR3C1_known16 | GGGAACACGGTGTACC | GGGTACACCGTGTTCCC |
| | C | |
| ZNF384_1 | GAAAAAATC | GATTTTTTC |
| MSX1_MSX2_1_SELEX\|MSX1_MSX1_1_SELEX\|MSX1_Msx3 | GCAATTAAAAACCAATT | TAATTGGTTTTTAATTGC |
| _1_SELEX\|MSX1_3\|MSX2_3\|MSX2_5 | A | |
| NFIA_MA0161.1_High-throughput\|NFIC_4 | TGCCAA | TTGGCA |
| ATFLCREM_f1_HocoMoco | CACTGACGTCA | TGACGTCAGTG |
| HIC1_1 | CCCCGGGCACCCGGG | CCCGGGTGCCCGGGG |
| POU6F1_pTH6519_PBM | ATTAATTAAT | ATTAATTAAT |
| POU3F3_V$OCT1_03_Transfac\|POU2F2_known3 | ACCTCATTACGAG | CTCGTAATGAGGT |
| PAX9_Poxm_SOLEXA_5_FBgn0003129_B1H | CAAAAGCAATCAACCGT | TCACGGTTGATTGCTTTT |
| | GA | G |
| RFX8_Rfx3_3961_PBM\|RFX8_pTH9278_PBM\|RFX8_pTH91 | CGTTGCTAAG | CTTAGCAACG |
| 94_PBM\|RFX8_pTH9269_PBM | | |
| ELF2_1 | GTGACCTACTTCCTGGC | TGCCAGGAAGTAGGTC |
| | A | AC |
| ETV5_MA0062.2_ChIP-seq\|ETS_known9 | CCGGAAGTGGC | GCCACTTCCGG |
| POU2F2_POU2F2_2_SELEX\|POU2F2_3 | CATGCATATGCAAA | TTTGCATATGCATG |
| EOMES_TBX21_4_SELEX\|TBX21_4 | GGTGTGATATCACACC | GGTGTGATATCACACC |
| NHLH2_V$HEN1_01_Transfac | GAGGGGCGCAGCTGCG | TTGGGGCGCAGCTGCG |
| | CCCCAA | CCCCTC |
| NR2F2_NR2F6 _a_HocoMoco | AGGACAAAGTTCACTTG | TCAAGTGAACTTTGTCC |
| | A | T |
| E2F1_E2F1_4_SELEX | AAATGGCGCCATTT | AAATGGCGCCATTT |
| MAFK_HepG2_MAFF_Stanford_ChIP-seq | TGCTGACTCAGCAAA | TTTGCTGAGTCAGCA |
| PPARA_PPARG_si_HocoMoco\|NR2F2_COT1_si_HocoMoco | CAAAGGTCA | TGACCTTTG |
| IRX3_pTH6408_PBM | ATTACAAG | CTTGTAAT |
| ENSG00000187728_pTH5087_PBM | AACATATGG | CCATATGTT |
| CEBPD_1 | AATTGCGTCACT | AGTGACGCAATT |
| RELA_SRP001843_p65_Input_LPSstim_ChIP- | GGGAAATTCCC | GGGAATTTCCC |
| seq\|RELA_TF65_f2_HocoMoco\|NFKB1_MA0105.3_ChIP- | | |
| seq | | |
| RFX8_pTH9249_PBM | CCCTGGCAAC | GTTGCCAGGG |
| STAT_disc2\|BCL_disc2 | AATGACTCAT | ATGAGTCATT |
| SREBP_disc1 | CGTCGCCATGGCAAC | GTTGCCATGGCGACG |
| SPI1_known2 | ACTTCCT | AGGAAGT |
| GLIS1_GLIS1_1_SELEX\|GLIS1_1 | AGACCCCCCACGAAGC | GCTTCGTGGGGGGTCT |
| NFAT_1 | ATTTTTCCTCTG | CAGAGGAAAAAT |
| HMX1_HMX1_1_SELEX\|H MX1_2 | AGCAATTAAAA | TTTTAATTGCT |
| HOXB5_1 | ACGGTAATTAGCTCAT | ATGAGCTAATTACCGT |
| CDC5L_V$CDC5_01_Transfac\|CDC5L1 | GATTTAACATAA | TTATGTTAAATC |
| MEF2B_Mv90_ChIP-seq | AAAATAGC | GCTATTTT |
| USF1_A549_USF1_HudsonAlpha_ChIP-seq | CCCGGTCACGTGACC | GGTCACGTGACCGGG |
| POU2F2_POU2F2_1_SELEX\|POU2F2_2 | AATTTGCATAT | ATATGCAAATT |
| MECP2_pTH3054_PBM | AATGACACTA | TAGTGTCATT |
| LHX8_Lhx8_2247_PBM | CCAATCAGC | GCTGATTGG |
| HOXA1_1\|HOXA5_3 | ACGGTAATTAGCTCAG | CTGAGCTAATTACCGT |
| MSX1_Dr_SOLEXA_FBgn0000492_B1H\|HOXC5_Ubx_FlyRe | CAATTA | TAATTG |
| g_FBgn0003944_B1H | | |
| GATA2_V$GATA1_05_Transfac\|GATA_known8 | GCAGATAACA | TGTTATCTGC |
| CEBPG_pTH5257_PBM | GATTGCGTAA | TTACGCAATC |
| SMARC_disc1 | CTGAGTCACC | GGTGACTCAG |
| XBP1_2 | ATTAAATGACACGTCAT | CTGAAAGATGACGTGTC |
| | CTTTCAG | ATTTAAT |
| VAX2_1 | GTCTTAATTAGTGCAC | GTGCACTAATTAAGAC |
| NFIL3_V$E4BP4_01_Transfac\|NFIL3_1 | CGTTACATAACG | CGTTATGTAACG |
| FOXD1_V$FREAC2_01_Transfac\|FOXF2_1 | CAAACGTAAACAATCC | GGATTGTTTACGTTTG |
| ENO1_ENOA_si_HocoMoco | CACCACGTGGGCA | TGCCCACGTGGTG |
| ZBTB42_V$RP58_01_Transfac\|ZBTB18_1 | GAAACATCTGGA | TCCAGATGTTTC |
| IKZF1_V$IK3_01_Transfac\|IKZF3_1 | GGTATTCCCAGTA | TACTGGGAATACC |
| THAP1_disc2 | AACATGGCGG | CCGCCATGTT |
| SRF_Srf_3509_PBM | CCAAATTTGG | CCAAATTTGG |
| FOXA_disc5 | AAAGGTCAA | TTGACCTTT |
| NR4A2_NR4A2_si_HocoMoco\|NR4A2_NR4A1_f1_HocoMo | AAAGGTCAC | GTGACCTTT |
| co | | |
| HES1_1 | AAGCCTCGTGGCCAG | CTGGCCACGAGGCTT |
| REST_disc5 | CAGCACCCCGG | CCGGGGTGCTG |
| TCF12_known1 | CAGCTGGC | GCCAGCTG |
| CTCFL_K562_CTCFL_HudsonAlpha_ChIP-seq | CCGCCAGGGGGCGCC | GGCGCCCCCTGGCGG |
| CTCF_HeLa-S3_CTCF_UW_ChIP-seq | CCACCAGGGGGCGCCG | CCGGCGCCCCCTGGTGG |
| | G | |
| IRX3_pTH5976_PBM | AAACATGTACT | AGTACATGTTT |
| HOXC10_Hoxa11_2_SELEX\|HOXA11_3 | ATTTTATGGCC | GGCCATAAAAT |
| FOXO6_pTH8995_PBM | TTGTAAACAA | TTGTTTACAA |
| ALX1_3 | CGCATTAATTAATTGGC | GCCAATTAATTAATGCG |
| ZNF274_K562b_ZNF274_UCD_ChIP-seq | CCAGTATGAATTCTC | GAGAATTCATACTGG |
| BACH1_Mv46_ChIP- | TGACTCAGCA | TGCTGAGTCA |
| seq\|MAFK_MAFK_si_HocoMoco\|MAF_disc1 | | |
| HOXC5_HXA7_f1_HocoMoco | AATCAATAGATTGGA | TCCAATCTATTGATT |
| ZFHX3_pTH6494_PBM | ACTAATTAG | CTAATTAGT |
| NR2F2_pTH5882_PBM | AGAGGTCAC | GTGACCTCT |
| CR936877.3_usp_SANGER_5_FBgn0003964_B1H | AGAGGTCAA | TTGACCTCT |
| STAT_known1 | TTCCCGGAA | TTCCGGGAA |
| IRX3_Irx2_0900_PBM | ATTACATGA | TCATGTAAT |
| EGR3_K562_EGR1_HudsonAlpha_ChIP-seq | CCCCCCCCCCCGCCCAC | TGCGTGGGCGGGGGGG |
| | GCA | GGGG |
| MEF2B_MEF26_1_SELEX\|MEF2B_1 | GCTATAAATAGC | GCTATTTATAGC |
| HAND2_Hand_da_SANGER_5_FBgn0032209_B1H\|TCF4_H | CACATGGCC | GGCCATGTG |
| and_da_SANGER_5_FBgn0000413_B1H | | |
| HOXC1O_HXD9_f1_HocoMoco | AGTTTTATTG | CAATAAAACT |
| ETV5_ELK4_f1_HocoMoco | CACCGGAAGTA | TACTTCCGGTG |
| JUN_K562_JUND_Stanford_ChIP-seq | GATGACGTCACCCC | GGGGTGACGTCATC |
| MTF1_MTF1_1_SELEX\|MTF1_3 | GTGCCGTGTGCAAA | TTTGCACACGGCAC |
| ZBTB7A_disc1 | AGCGCCCCCT | AGGGGGCGCT |
| FOXD1_Foxj1_3125_PBM | AATAAACAAACA | TGTTTGTTTATT |
| USF1_K562_USF2_Stanford_ChIP- | GGGTCACGTGACC | GGTCACGTGACCC |
| seq\|USF1_HepG2_USF2_Stanford_ChIP-seq | | |
| PKNOX2_Hth_SOLEXA_FBgn0001235_B1H\|TG\|F1_Vis_SOL | TGTCAA | TTGACA |
| EXA_FBgn0033748_B1H\|TG\|F1_Achi_SOLEXA_FBgn003374 | | |
| 9_B1H | | |
| KLF4_CG12029_SOLEXA_5_FBgn0035454_B1H | CCAGCCACACCCACC | GGTGGGTGTGGCTGG |
| TP53_3 | AGACAAGTCC | GGACTTGTCT |
| GATA2_V$GATA1_01_Transfac\|GATA_known1 | CCCTATCACG | CGTGATAGGG |
| HIVEP3_ZEP1_f1_HocoMoco | GGGGATTTCCCA | TGGGAAATCCCC |
| CDX_1 | TACAAACAAAGTAATAA | TTTATTACTTTGTTTGTA |
| | A | |
| NFIC_1 | CACCTGTTCAATTTGGC | TGTTGGCTCCGTGCCAA |
| | ACGGAGCCAACA | ATTGAACAGGTG |
| POU3F3_pTH9381_PBM | ATAATGCATA | TATGCATTAT |
| E2F2_pTH9195_PBM\|E2F2_pTH9291_PBM\|E2F3_pTH9382 | TTGGCGCCAA | TTGGCGCCAA |
| PBM | | |
| PRRX2_3 | AAAGCTAATTAGCGAAA | TTTCGCTAATTAGCTTT |
| STAT6_STAT6_do_HocoMoco | AAATTCCTGGGAA | TTCCCAGGAATTT |
| EGR3_EGR2_si_HocoMoco | CCGCCCACGCC | GGCGTGGGCGG |
| NR6A1_NR6A1_do_HocoMoco | AAGTTCAAGGTCA | TGACCTTGAACTT |
| TAL1_disc1 | CCTTATCTGCCCCCACCA | CTGGTGGGGGCAGATA |
| | G | AGG |
| ARID5A_ARI5B_f1_HocoMoco | CACAATACTAACC | GGTTAGTATTGTG |
| FOXD1_FoxI1_2809_PBM | AATGTAAACA | TGTTTACATT |
| FOXD1_Foxc1_1_SELEX\|FOXD1_FOXC2_2_SELEX\|FOXC2_2 | GTAAATAAACA | TGTTTATTTAC |
| \|FOXC1_6 | | |
| RAR_1 | AAGGACAGG | CCTGTCCTT |
| STAT4_V$STAT4_01_Transfac | AAGAAATC | GATTTCTT |
| PRDM1_disc1 | AGTGAAAGTG | CACTTTCACT |
| STAT5B_V$STAT5A_04_Transfac | AAGAAATG | CATTTCTT |
| TEAD1_1 | CATTCC | GGAATG |
| NR3C1_known13 | ATAAGAACACCCTGTAC | GGCGGGTACAGGGTGT |
| | CCGCC | TCTTAT |
| ZNF713_ZNF713_1_SELEX\|ZNF713_1 | TAGAAAAATGCCACGAA | TTCGTGGCATTTTTCTA |
| EGR3_EGR4_1_SELEX\|EGR4_2 | AAATGCGTGGGCGTAA | TTACGCCCACGCATTT |
| HNF1A_HNF1A_f1_HocoMoco | GGTTAATAATTAACC | GGTTAATTATTAACC |
| NFIC_3 | TCTTGGCAAGTATCCAA | TTGGATACTTGCCAAGA |
| SP1_disc1 | ACCCCCCCTTCTGATTG | TCAGCCAATCAGAAGG |
| | GCTGA | GGGGGT |
| EGR3_EGR4_2_SELEX | AAATGCGTGGGCGTAT | ATACGCCCACGCATTT |
| MEF2B_MEF2C_f1_HocoMoco | TCTATTTATAGAA | TTCTATAAATAGA |
| CACD_2 | CCACACCC | GGGTGTGG |
| ELF1_disc3 | CCCCGGCCTCCGC | GCGGAGGCCGGGG |
| NR3C1_known5 | AGAACAGA | TCTGTTCT |
| PTF1A_Fer3_da_SANGER_5_FBgn0037937_B1H\|TCF4_Fer | CAGCTGTTAC | GTAACAGCTG |
| 3_da_SANGER_5_FBgn0000413_B1H | | |
| BHLHE40_disc1 | AGTCACGTGA | TCACGTGACT |
| HERPUD1_1 | CAGTTGCTAGGCAACGG | CCCGTTGCCTAGCAACT |
| | G | G |
| HBP1_1 | ACTATGAATGAATGAT | ATCATTCATTCATAGT |
| REST_disc8 | CCTCGGACAGCTGC | GCAGCTGTCCGAGG |
| SOX11_Sox11_2266_PBM | ATTGTTCTC | GAGAACAAT |
| JUN_H1-hESCJUND_HudsonAlpha_ChIP-seq | ATGACTCACCC | GGGTGAGTCAT |
| MNT_MNT_1_SELEX\|MNT_1 | ACCACGTGCC | GGCACGTGGT |
| TFAP4_3 | ACCAGCTGTG | CACAGCTGGT |
| OSR2_bowl_SANGER_5_FBgn0004893_B1H | CCAGTAGC | GCTACTGG |
| HOXB13_HXD13_f1_HocoMoco | TCCCTAATAAA | TTTATTAGGGA |
| SPIC_GM12891_PU1_HudsonAlpha_ChIP-seq | AAAGAGGAAGTGAAAC | CTAGTTTCACTTCCTCTT |
| | TAG | T |
| RELA_GM18951_NFKB_Stanford_ChIP-seq | GGGGATTTCCA | TGGAAATCCCC |
| NKX2-8_3 | CCACTTGAA | TTCAAGTGG |
| TCF4_sage_da_SANGER_5_FBgn0000413_B1H | AAAACACCTGT | ACAGGTGTTTT |
| ATF7_V$CREBP1_Q2_Transfac\|ATF2_2 | AGTTACGTCACC | GGTGACGTAACT |
| AR_GCR_do_HocoMoco | CCGGGACAGTCTGTTCT | GAGAACAGACTGTCCCG |
| | C | G |
| OVOL1_I$OVO_01_Transfac | GTGACTGTTACTATA | TATAGTAACAGTCAC |
| CTCF_WERI-Rb-1_CTCF_UW_ChIP- | CCACCAGGGGGCGCC | GGCGCCCCCTGGTGG |
| seq\|CTCF_GM12873_CTCF_UW_ChIP- | | |
| seq\|CTCF_GM12864_CTCF_UW_ChIP- | | |
| seq\|CTCF_Gliobla_CTCF_UT-A_ChIP-seq\|CTCF_T- | | |
| 47D_CTCF_HudsonAlpha_ChIP- | | |
| seq\|CTCF_AG04450_CTCF_UW_ChIP-seq | | |
| OLIG2_pTH5164_PBM | CCATATGGTAC | GTACCATATGG |
| KLF4_KLF6_si_HocoMoco | CCGCCCCC | GGGGGCGG |
| RORB_pTH6612_PBM | ACTGACCTCT | AGAGGTCAGT |
| EOMES_EOMES_1_SELEX\|EOMES_2 | AAGGTGTGAAAAT | ATTTTCACACCTT |
| SOX9_SOX8_3_SELEX\|SOX8_4 | GAACAATTGCAGTGTTC | GAACACTGCAATTGTTC |
| ESRRG_Esrra_2_SELEX\|ESRRG_ESRRA_1_SELEX\|ESRRA_kn | ATGACCTTGAA | TTCAAGGTCAT |
| own7\|ESRRA_known11 | | |
| SOX9_SOX9_7_SELEX\|SOX9_9 | AATGAATTGCAGTCATT | AATGACTGCAATTCATT |
| VDR_3 | AAACGGTTCAGGAAGTT | GATGAACTTCCTGAACC |
| | CATC | GTTT |
| POU6F2_POU6F2_1_SELEX\|POU6F1_Pou6f1_1731_PBM\|P | AGCTCATTAT | ATAATGAGCT |
| OU6F1_Pou6f1_3733_PBM\|POU6F2_1 | | |
| RAD21_disc10 | CCAGGGGGCAG | CTGCCCCCTGG |
| IRF7_IRF7_f1_HocoMoco | GAAAGTGAAA | TTTCACTTTC |
| HOXC5_zen_FlyReg_FBgn0004053_B1H | AATTTTAATG | CATTAAAATT |
| PATZ1_V$MAZR_01_Transfac\|PATZ1_1 | GGGGGGGGGGCCA | TGGCCCCCCCCCC |
| FOXO3_3 | TGTAAACA | TGTTTACA |
| HOXC10_HXA10_f1_HocoMoco | GATGATTTATGA | TCATAAATCATC |
| YY1_disc4 | GCAGCCGGCGCCGCC | GGCGGCGCCGGCTGC |
| SOX7_SOX7_1_SELEX\|SOX7_2 | AACAATGAACATTGTT | AACAATGTTCATTGTT |
| MITF_pTH5072_PBM\|BACH1_Mv45_ChIP- | CACGTGAC | GTCACGTG |
| seq\|ATF3_Mv41_ChIP-seq | | |
| HNF4G_HNF4A_2_SELEX\|HNF4_known17 | AATGGACTTTGACCCC | GGGGTCAAAGTCCATT |
| BARX2_1 | TAAGTAATTAGTTATA | TATAACTAATTACTTA |
| PAX3_PAX7_1_SELEX\|PAX3_PAX7_2_SELEX\|PAX3_PAX3_1 | TAATCGATTA | TAATCGATTA |
| SELEX\|PAX3_3\|PAX7_2\|PAX7_3 | | |
| LHX9_pTH5812_PBM | CTAATTAGTA | TACTAATTAG |
| MYBL2_MYBL2_1_SELEX\|MYBL2_1 | AACCGTTAACCGTT | AACGGTTAACGGTT |
| FOSL1_FOS_si_HocoMoco | GACCAATCAGAA | TTCTGATTGGTC |
| EMX2_Emx2_3420_PBM | CTAATTAGC | GCTAATTAG |
| CTCF_disc7 | CCACCAGGGG | CCCCTGGTGG |
| SIX6_MA0199.1_B1H | TATCA | TGATA |
| TEAD4_TEAD4_f1_HocoMoco | AAAAATAGCCCT | AGGGCTATTTTT |
| SOX_1 | CTCTTTGTTACGA | TCGTAACAAAGAG |
| C11orf9_pTH8554_PBM | CCGTACCACC | GGTGGTACGG |
| TBX5_2 | TAACACCTCA | TGAGGTGTTA |
| SP9_V$SP1_01_Transfac\|SP1_known1 | ACCCCGCCCC | GGGGCGGGGT |
| OSR1_1 | TTTTACAGTAGCAAAA | TTTTGCTACTGTAAAA |
| ETV5_pnt_SANGER_5_FBgn0003118_B1H\|ETV5_Ets21c_S | ACCGGAAAT | ATTTCCGGT |
| ANGER_5_FBgn0005660_B1H | | |
| AP3_1 | AATTTAGA | TCTAAATT |
| SIX2_So_SOLEXA_FBgn0003460_B1H | ATATGATA | TATCATAT |
| FOXD1_FOXD3_1_SELEX\|FOXD3_3 | AGTAAATATTAACT | AGTTAATATTTACT |
| PAX5_disc2 | CAAGCGTGAC | GTCACGCTTG |
| NR2F2_MA0017.1_COMPILED\|HNF4_known2\|HNF4_know | AGGTTCAAAGGTCA | TGACCTTTGAACCT |
| n13 | | |
| NFIC_2 | TCTTGGCAAGAAGCCAA | TTTGGCTTCTTGCCAAG |
| | A | A |
| MAX_MXL3_PBM\|CLOCK::ARNTL1 | ACACGTGG | CCACGTGT |
| NPAS2_Clk_cyc_SANGER_5_FBgn0023076_B1H\|ARNT2_Cl | ACACGTGA | TCACGTGT |
| k_cyc_SANGER_5_FBgn0023094_B1H | | |
| BCL_disc6 | GGGAAAGCCC | GGGCTTTCCC |
| MLX1P_pTH5466_PBM | ACACGTGC | GCACGTGT |
| MYC_known16 | ACCACGTGGTC | GACCACGTGGT |
| FOXD1_MA0148.3_ChIP-seq | CAAAGTAAACATGGA | TCCATGTTTACTTTG |
| EN2_EN2_1_SELEX\|EN2_2 | GTTAATTGGA | TCCAATTAAC |
| FOXD1_MA0047.2_ChIP-seq\|FOXA_known6 | CCTAAGTAAACA | TGTTTACTTAGG |
| MEF2B_MA0052.2_ChIP-seq | AGCTAAAAATAGCAT | ATGCTATTTTTAGCT |
| RBPJ_I$SUH_01_Transfac | ACTGTGGGAAACG | CGTTTCCCACAGT |
| PAX8_2 | ACTCACGCAATACTG | CAGTATTGCGTGAGT |
| CEBPG_1 | CTCATTTCAAAAA | TTTTTGAAATGAG |
| MEIS3_1 | AATTACCTGTCAATAC | GTATTGACAGGTAATT |
| AR_pTH5924_PBM | ATGTTCCCA | TGGGAACAT |
| NKX6-3_1 | CAAAGTAATTAATTATC | GATAATTAATTACTTTG |
| FEZF2_CG31670_SANGER_5_FBgn0031375_B1H | AAATGAGCAAC | GTTGCTCATTT |
| TWIST2_twi_da_SANGER_5_FBgn0003900_B1H\|TCF4_twi | AACATCTGGT | ACCAGATGTT |
| _da_SANGER_5_FBgn0000413_B1H | | |
| MYBL1_MYBL1_3_SELEX\|MYBL1_4 | AAAACCGTTAA | TTAACGGTTTT |
| MYB_2 | CTCAACTGGC | GCCAGTTGAG |
| TP73_Tp73_1_SELEX\|TP73_1 | GACATGTCCAGACATGT | GACATGTCTGGACATGT |
| | C | C |
| JUN_GM12878_JUND_Stanford_ChIP-seq | AGTTTCGATATGAGTCA | GATGACTCATATCGAAA |
| | TC | CT |
| HOXB13_HOXA13_1_SELEX\|HOXB13_HOXB13_1_SELEX\|H | CCAATAAAAC | GTTTTATTGG |
| OXA13_2\|HOXB13_2 | | |
| HOXB13_HOXC13_1_SELEX\|HOXB13_HOXA13_3_SELEX\|H | CCAATAAAAA | TTTTTATTGG |
| OXB13_Hoxd13_1_SELEX\|HOXB13_HOXD13_1_SELEX\|HO | | |
| XA13_4\|HOXC13_2\|HOXD13_2\|HOXD13_4 | | |
| IRX3_Irx5_2385_PBM | AATTACATG | CATGTAATT |
| NFKB_disc4 | AAAGTCCCC | GGGGACTTT |
| POU3F3_V$OCT1_C16_Transfac | CTGATTTGCATATTC | GAATATGCAAATCAG |
| TEAD1_TEAD1_1_SELEX\|TEAD4_TEAD4_1_SELEX\|TEAD1_3 | ATGGAATGTG | CACATTCCAT |
| \|TEAD4_1 | | |
| ZNF589_1 | CCAGGGTATCAGCCG | CGGCTGATACCCTGG |
| NANOG_disc3 | CCACAGCAGG | CCTGCTGTGG |
| FOXD1_FOXD3_f1_HocoMoco | AAACAAACA | TGTTTGTTT |
| CTCF_AG09319_CTCF_UW_ChIP-seq | GCCACCAGAGGGCGC | GCGCCCTCTGGTGGC |
| CEBPB_disc2 | AGCCAATCA | TGATTGGCT |
| CUX1_V$CLOX_01_Transfac\|CUX1_V$CDP_02_Transfac\|C | AAAATAATCGATATA | TATATCGATTATTTT |
| UX1_2 | | |
| MEIS1_pTH6524_PBM | AAATGACAGCTC | GAGCTGTCATTT |
| BARHL2_Barhl1_3_SELEX\|BARHL1_4 | CATTTAGCAGCAATTA | TAATTGCTGCTAAATG |
| HOXC9_1 | ATAATTAATGACCTCC | GGAGGTCATTAATTAT |
| BHLHE40_known1 | CCGTCACGTGACCA | TGGTCACGTGACGG |
| PBX3_PBX3_f2_HocoMoco | CCAGCCAATCAGAG | CTCTGATTGGCTGG |
| RFX8_GM12878_RFX5_Stanford_ChIP-seq | CCTAGCAACAGGTGA | TCACCTGTTGCTAGG |
| TCF4_HLH4C_da_SANGER_5_FBgn0000413_B1H\|NHLH2_ | AAAAACACCTGCGCC | GGCGCAGGTGTTTTT |
| HLH4C_da_SANGER_5_FBgn0011277_B1H | | |
| MAX_HUVEC_MAX_Stanford_ChIP-seq | GGCCACGTGACCC | GGGTCACGTGGCC |
| NR5A1_MA0505.1_ChIP-seq | AAGTTCAAGGTCAGC | GCTGACCTTGAACTT |
| SP9_pTH5422_PBM | GTACCCTA | TAGGGTAC |
| ATOH7_ato_da_SANGER_5_3_FBgn0010433_B1H\|TCF4_at | CCACCTGCC | GGCAGGTGG |
| o_da_SANGER_5_3_FBgn0000413_B1H | | |
| EN1_3 | GCATTAATTAGTTCGC | GCGAACTAATTAATGC |
| CIC_Cic_3454_PBM | AGTCAGCAAA | TTTGCTGACT |
| MSX1_MSX1_3_SELEX\|MSX1_5 | CCAATTAG | CTAATTGG |
| CTCF_Fibrobl_CTCF_UT-A_ChIP-seq | CGGCCACCAGGGGGC | GCCCCCTGGTGGCCG |
| NHLH2_V$HEN1_02_Transfac\|NHLH1_1 | AGGGGACGCAGCTGCG | AGGGGGCGCAGCTGCG |
| | CCCCCT | TCCCCT |
| SOX13_V$SOX5_01_Transfac\|SOX5_1 | GTATTGTTAA | TTAACAATAC |
| USF1_V$USF_01_Transfac\|MYC_known3 | AGATCACGTGATCT | AGATCACGTGATCT |
| SOX15_SOX15_a_HocoMoco | AACAATG | CATTGTT |
| IRF4_GM12878_IRF4_HudsonAlpha_ChIP-seq | AATGTGGAAATGAGTCA | CTGACTCATTTCCACATT |
| | G | |
| NKX2-5_NKX25_f1_HocoMoco\|NKX2- | CACTTGA | TCAAGTG |
| 5_V$NKX25_01_Transfac\|NKX2-5_1 | | |
| SOX13_Sox13_1718_PBM | GAACAATA | TATTGTTC |
| ZKSCAN1_pTH2280_PBM | ATGTGCACAT | ATGTGCACAT |
| VENTX_VENTX_1_SELEX\|VENTX_1 | ACCGATTAG | CTAATCGGT |
| MYC_K562_CMYC_UT-A_ChIP-seq | GCCACGTGGCC | GGCCACGTGGC |
| UNCX_1 | CATAATTAATTAACGCG | CGCGTTAATTAATTATG |
| SREBF2_SRBP1_f2_HocoMoco | CTCACCCCACC | GGTGGGGTGAG |
| NR2E1_dsf_SANGER_5_FBgn0015381_B1H\|NR2E1_tll_NA | AAAAGTCAAA | TTTGACTTTT |
| R_FBgn0003720_B1H\|NR2E1_MA0459.1_B1H | | |
| HNF1A_Tcf1_2666_PBM\|HMBOX1_Hmbox1_2674_PBM | CTAGTTAA | TTAACTAG |
| CXXC1_CXXC1_si_HocoMoco | CGTTGGC | GCCAACG |
| PAX6_V$PAX6_01_Transfac\|PAX6_1 | AATTTTCACGCATGAGT | GTGAACTCATGCGTGAA |
| | TCAC | AATT |
| NR2F2_pTH6747_PBM | AGGGGTCA | TGACCCCT |
| STAT3_HeLa-53_STAT3_Stanford_ChIP-seq | CATTTCCCGGAAG | CTTCCGGGAAATG |
| ATF3_known1 | CTCTGACGTCACCC | GGGTGACGTCAGAG |
| TCF7L2_known2 | CTTTGA | TCAAAG |
| T_MA0009.1_SELEX\|T_2 | CTAGGTGTGAA | TTCACACCTAG |
| FOXD1_FOXJ2_f1_HocoMoco | TAAATAAACA | TGTTTATTTA |
| FOSL1_HeLa-S3_CFOS_Stanford_ChIP-seq | GATGACTCACACA | TGTGTGAGTCATC |
| NFATC1_NFAC4_a_HocoMoco | AAATTTTCCT | AGGAAAATTT |
| TFAP2A_Tcfap2c_2912_PBM | CGCCCGAGGC | GCCTCGGGCG |
| SOX2_1 | CCTTTGTTATGCAAA | TTTGCATAACAAAGG |
| TBX1_TBX1_1_SELEX\|TBX1_1 | AGGTGTGAAAAAAGGT | TCACACCTTTTTTCACAC |
| | GTGA | CT |
| BHLHE40_known2 | GGAAGAGTCACGTGAC | GTATTGGTCACGTGACT |
| | CAATAC | CTTCC |
| EGR3_V$NGF1C_01_Transfac\|EGR4_1 | ATGCGTGGGCGG | CCGCCCACGCAT |
| ATOH7_ato_da_SANGER_5_2_FBgn0010433_B1H\|TCF4_at | ACATCTGTC | GACAGATGT |
| o_da_SANGER_5_2_FBgn0000413_B1H\|OLIG2_0li_da_SA | | |
| NGER_5_3_FBgn0032651_B1H\|TCF4_Oli_da_SANGER_5_3 | | |
| FBgn0000413_B1H | | |
| REST_U87_N RSF_HudsonAlpha_ChIP-seq | ACCATGGACAGCGCC | GGCGCTGTCCATGGT |
| RXRA_known6 | AAAGGTCAAAGGTCAA | GTTGACCTTTGACCTTT |
| | C | |
| ETV6_ETV7_si_HocoMoco | GCCACAGGAAGTAACA | GTGTTACTTCCTGTGGC |
| | C | |
| TCF4_Oli_da_SANGER_5_1_FBgn0000413_B1H\|OLIG2_Oli | CACCATATGGC | GCCATATGGTG |
| _da_SANGER_5_1_FBgn0032651_B1H | | |
| RUNX2_3 | ACCACAAA | TTTGTGGT |
| STAT_disc6 | AGGCAGGAA | TTCCTGCCT |
| NR5A1_NR5A2_f1_HocoMoco | TGGCCTTGAA | TTCAAGGCCA |
| NKX2-6_MA0247.2_ChIP-chip | CCACTTGAAA | TTTCAAGTGG |
| ZFY_ZFX_a_HocoMoco | GCCGAGGCCTGGGGCC | GGGGGCCCCAGGCCTC |
| | CCC | GGC |
| CTCF_SAEC_CTCF_UW_ChIP- | CCACCAGGGGGCG | CGCCCCCTGGTGG |
| seq\|CTCF_HPF_CTCF_UW_ChIP-seq | | |
| NHLH1_2 | ATGGGGCGCAGCTGCG | GAGGGGCGCAGCTGCG |
| | CCCCTC | CCCCAT |
| E2F6_K562_E2F6_HudsonAlpha_ChIP-seq | CTTCCCGCCCC | GGGGCGGGAAG |
| CTCF_H1-hESC_CTCF_Broad_ChIP-seq\|CTCF_MCF- | GCCACCAGGGGGCGC | GCGCCCCCTGGTGGC |
| 7_CTCF_UT-A_ChIP-seq\|CTCF_N HEK_CTCF_Broad_ChIP- | | |
| seq\|CTCF_H1-hESC_CTCF_HudsonAlpha_ChIP- | | |
| seq\|CTCF_GM12874_CTCF_UW_ChIP- | | |
| seq\|CTCF_GM12872_CTCF_UW_ChIP-seq\|CTCF_Caco- | | |
| 2_CTCF_UW_ChIP-seq\|CTCF_GM12865_CTCF_UW_ChIP- | | |
| seq\|CTCF_HA-sp_CTCF_UW_ChIP- | | |
| seq\|CTCF_K562_CTCF_UT-A_ChIP- | | |
| seq\|CTCF_GM12875_CTCF_UW_ChIP- | | |
| seq\|CTCF_AoAF_CTCF_UW_ChIP- | | |
| seq\|CTCF_K562_CTCF_UW_ChIP- | | |
| seq\|CTCF_HRE_CTCF_UW_ChIP- | | |
| seq\|CTCF_BJ_CTCF_UW_ChIP-seq\|SMC3_disc1 | | |
| POU3F3_V$OCT1_05_Transfac\|POU2F2_known5 | AATATGCAAATTAT | ATAATTTGCATATT |
| GMEB2_pTH9211_PBM | TACGTAA | TTACGTA |
| ESR2_HepG2_ERRA_Stanford_ChIP-seq | GGCCCAAGGTCACA | TGTGACCTTGGGCC |
| DLX1_DLX3_do_HocoMoco | GATAATTACA | TGTAATTATC |
| REST_disc7 | ACAGCGTC | GACGCTGT |
| POU1F1_POU1F1_2_SELEX\|POU1F1_5 | AATATGCAAATTAG | CTAATTTGCATATT |
| NR6A1_V$GCNF_01_Transfac\|N R6A1_1 | CTCAAGTTCAAGTTCAC | GGTGAACTTGAACTTGA |
| | C | G |
| FOXD1_FOXC2_1_SELEX\|FOXD1_FOXC1_2_SELEX\|FOXC1_ | TGTAAATATTGACA | TGTCAATATTTACA |
| 4\|FOXC2_1 | | |
| JUN_MA0488.1_ChIP-seq | AAGATGATGTCAT | ATGACATCATCTT |
| ZIC2_2\|Z1C3_2 | ACCCCCCCGGGGGGG | CCCCCCCGGGGGGGT |
| GATA2_pnr_SANGER_5_FBgn0003117_B1H | CAGATAA | TTATCTG |
| MEF2_disc1 | TGCTAAAAATAGCAA | TTGCTATTTTTAGCA |
| MEF2B_GM12878_MEF2C_HudsonAlpha_ChIP-seq | ATGCCAAAAATAGCA | TGCTATTTTTGGCAT |
| BARHL2_BARHL2_3_SELEX\|BARHL2_4 | CATTTAACACCAATTA | TAATTGGTGTTAAATG |
| RFX8_RFX2_1_SELEX\|RFX8_RFX5_1_SELEX\|RFX8_RFX3_1_ | CGTTGCCATGGCAACG | CGTTGCCATGGCAACG |
| SELEX\|RFX8_RFX4_1_SELEX\|RFX2_1\|RFX3_2\|RFX5_known | | |
| 6\|RFX5_known8 | | |
| RFX8_Rfx3_1_SELEX\|RFX8_Rfx2_1_SELEX\|RFX8_YLR176C_ | CGTTGCCATGGCAACC | GGTTGCCATGGCAACG |
| 1478_DeBoer11\|RFX2_3\|RFX3_4 | | |
| ZEB1_V$AREB6_04_Transfac\|ZEB1_known4 | CTGAAACAG | CTGTTTCAG |
| GSX2_1 | AGGTTAATTAGCTGAT | ATCAGCTAATTAACCT |
| STAT5B_STA5B_f1_HocoMoco | AATTCCCAGAAAA | TTTTCTGGGAATT |
| GATA2_GATA3_2_SELEX\|GATA_known20 | AGATAAGG | CCTTATCT |
| GATA2_GATA3_1_SELEX\|GATA2_GATA5_1_SELEX\|GATA2_ | AGATAAGA | TCTTATCT |
| MA0037.2_ChIP- | | |
| seq\|GATA2_GATA4_1_SELEX\|GATA_known19\|GATA_kno | | |
| wn21\|GATA_known22 | | |
| CTCF_Osteobl_CTCF_Broad_ChIP-seq | AGCGCCCCCTGGTGGCC | TGGCCACCAGGGGGCG |
| | A | CT |
| RORB_RORA_f1_HocoMoco | AAAACTAGGTCA | TGACCTAGTTTT |
| GATA_disc5 | AGCCAAACC | GGTTTGGCT |
| CACBP_1 | CCCACCCTC | GAGGGTGGG |
| STAT_known16 | CTTCCTGGAA | TTCCAGGAAG |
| IRF8_IRF8_si_HocoMoco | CAGTTTCAGTTTCTC | GAGAAACTGAAACTG |
| HOXD12_HOXD12_1_SELEX\|HOXD12_HOXC12_1_SELEX\|H | GTAATAAAA | TTTTATTAC |
| OXD12_HOXD12_4_SELEX\|HOXC12_21HOXD12_2 | | |
| HOXB13_Hoxd13_2356_PBM\|HOXB13_Hoxa13_3126_PB | CTCATAAAA | TTTTATGAG |
| M | | |
| AIRE_2 | GGTTATTAATTGGTTAT | TAACCAATATAACCAAT |
| | ATTGGTTA | TAATAACC |
| SMC3_disc4 | CTGGTGGC | GCCACCAG |
| MYC_known1 | CGACCACGTGGTCA | TGACCACGTGGTCG |
| BHLHE40_BHLHB3_1_SELEX\|BHLHE41_1 | GGCACGTGAC | GTCACGTGCC |
| FOXD1_I$CROC_01_Transfac | AAAAATAAATATAAGG | CCTTATATTTATTTTT |
| TBX3_pTH9182_PBM1TBX3_pTH9244_PBM | GAGGTGTCAA | TTGACACCTC |
| CEBPA_V$CEBPB_01_Transfac\|CEBPB_known1 | ACATTGCACAATCT | AGATTGTGCAATGT |
| MAX_dm_Max_SANGER_10_FBgn0017578_B1H | ACCACGTGTC | GACACGTGGT |
| FOSL1_HUVEC_CFOS_UCD_ChIP-seq | ATGACTCACTC | GAGTGAGTCAT |
| SOX11_Sox4_2941_PBM | AGAACAATG | CATTGTTCT |
| GLI_1 | CCTGGGTGGTCC | GGACCACCCAGG |
| STAT1_V$STAT1_01_Transfac\|STAT_known2 | CCCCATTTCCCGGAAAT | GGTGATTTCCGGGAAAT |
| | CACC | GGGG |
| HOXC10_Hoxa9_2622_PBM | GCCATAAA | TTTATGGC |
| GMEB2_GMEB2_1_SELEX\|GMEB2_1 | GTACGTAA | TTACGTAC |
| ESR2_ESR1_do_HocoMoco | AGGTCACGGTGACCTG | CCCAGGTCACCGTGACC |
| | GG | T |
| HOXA4_GSX1_1_SELEX1GSX1_1 | CCTAATTAAA | TTTAATTAGG |
| PITX2_Pitx1_2312_PBM\|DMBX1_Dmbx1_2277_PBM | GGGGATTAA | TTAATCCCC |
| RORB_pTH6142_PBM\|NR2F2_Nr2f2_2192_PBM\|NR2F2_p | GAGGTCAC | GTGACCTC |
| TH3811_PBM\|RARG_Rara_1051_PBM | | |
| NR2C2_pTH3466_PBM | GAGGTCAA | TTGACCTC |
| ETV5_HEK293b_ELK4_UCD_ChIP-seq | CCACTTCCGG | CCGGAAGTGG |
| CREB3L2_CREB3L1_6_SELEX\|CREB3L2_CREB3L1_4_SELEX\| | ATGCCACGTCATCA | TGATGACGTGGCAT |
| CREB3L2_CREB3L1_1_SELEX\|CREB3L1_1\|CREB3L1_4 | | |
| ATF5_Atf4_1_SELEX\|ATF4_3 | AGGATGATGCAATC | GATTGCATCATCCT |
| FOXO6_FOXO1_si_HocoMoco | AAAAAGTAAACAAACC | GGTTTGTTTACTTTTT |
| ONECUT3_HNF6_f1_HocoMoco | AAAAAATCAATAAA | TTTATTGATTTTTT |
| BACH1_V$BACH2_01_Transfac\|BACH2_1 | CGTGAGTCATC | GATGACTCACG |
| HOXA10_1 | TAGGTAATAAAATTCA | TGAATTTTATTACCTA |
| TFAP2A_AP2C_f1_HocoMoco | GCCCCAGGC | GCCTGGGGC |
| CRX_2 | AGGCTAATCCCCAACG | CGTTGGGGATTAGCCT |
| HOXD13_1 | AGAATTTTATTGGTAG | CTACCAATAAAATTCT |
| HIF1A::ARNT_1 | GCACGTCC | GGACGTGC |
| SOX2_SOX21_1_SELEX\|SOX21_2 | AACAATGGTAGTGTT | AACACTACCATTGTT |
| ZNF350_ZN350_f1_HocoMoco | ACGGGGCGCAGGGATT | GGGCAACAAATCCCTGC |
| | TGTTGCCC | GCCCCGT |
| HOXC5_ftz_FlyReg_FBgn0001077_B1H | GGCAATTA | TAATTGCC |
| YY1_disc3 | CGCCGCCGCC | GGCGGCGGCG |
| TFAP4_V$AP4_C15_Transfac\|TFAP4_V$AP4_C16_Transfac\|T | ACCAGCTGAG | CTCAGCTGGT |
| FAP4_2 | | |
| TFAP2A_AP2B_f1_HocoMoco | GCCCCCGGGC | GCCCGGGGGC |
| ZNF350_1 | AAAGGGCTGCGGCCC | GGGCCGCAGCCCTTT |
| LCOR_pTH9220_PBM | AATTTTGGCA | TGCCAAAATT |
| YBX1_YBOX1_f2_HocoMoco | GGCCAATCCCC | GGGGATTGGCC |
| JUN_K562_JUNB_UChicago_ChIP-seq | AAGGATGAGTCACCG | CGGTGACTCATCCTT |
| USF1_H1-hESC_USF2_Stanford_ChIP-seq | CGCGGTCACGTGACCC | GGGTCACGTGACCGCG |
| DMRTA1_1 | AAATTGTTACATT | AATGTAACAATTT |
| LCOR_pTH8649_PBM | AATTTTGGCT | AGCCAAAATT |
| IKZF1_V$LYF1_01_Transfac\|IKZF1_2 | TCTCCCAAA | TTTGGGAGA |
| SPIC_K562_PU1_HudsonAlpha_ChIP- | AAAAAGAGGAAGTGG | CCACTTCCTCTTTTT |
| seq\|SPIC_SRP005406_SPI1_ChIP-seq | | |
| CTCF_MA0139.1_ChIP- | TAGCGCCCCCTGGTGGC | TGGCCACCAGGGGGCG |
| seq\|CTCF_CTCF_f2_HocoMoco\|CTCF_known1 | CA | CTA |
| ZBTB6_ZBTB6_si_HocoMoco | AGATGATAGAGCC | GGCTCTATCATCT |
| POU4F1_pTH8341_PBM | ATATGCAT | ATGCATAT |
| GATA2_MA0036.2_ChIP-seq | ACAGATAAGAATCT | AGATTCTTATCTGT |
| ESR2_Mv67_ChIP-seq | CCAAGGTCAC | GTGACCTTGG |
| NFIL3_pTH3041_PBM | ACGTAATA | TATTACGT |
| ASCL2_1 | CAGGAGCAGCTGCTGA | CTCAGCAGCTGCTCCTG |
| | G | |
| RFX5_disc1 | CCCTAGCAAC | GTTGCTAGGG |
| RFX8_RFX3_f1_HocoMoco | GGTTGCCATGGTAA | TTACCATGGCAACC |
| GBX2_Unpg_Cell_FBgn0015561_B1H | CTTAATTA | TAATTAAG |
| TLX3_TLX1_J2_HocoMoco | CCTTGGCAACTTGCCAG | CTGGCAAGTTGCCAAGG |
| CUX1_CUX1_f1_HocoMoco | AGGGGGATCGATGG | CCATCGATCCCCCT |
| GATA2_Gata3_1024_PBM | CTTATCTCTA | TAGAGATAAG |
| KLF4_MA0493.1_ChIP-seq | GGCCACACCCA | TGGGTGTGGCC |
| EVX2_EVX1_1_SELEX\|EVX2_EVX2_1_SELEX\|EVX1_2\|EVX2 | GCTAATTACC | GGTAATTAGC |
| 2 | | |
| OSR2_1 | ATGTACAGTAGCAAAG | CTTTGCTACTGTACAT |
| FOXD1_Mv69_ChIP-seq | CTAAGTAAACAAG | CTTGTTTACTTAG |
| NKX2-5_pTH5945_PBM | AACCACTTAAG | CTTAAGTGGTT |
| LHX6_1 | GAGCGTTAATTAATGTA | TACATTAATTAACGCTC |
| NFKB1_NFKB1_f1_HocoMoco\|NFKB_known8 | GGGGAATCCCC | GGGGATTCCCC |
| MXI1_Mv93_ChIP-seq | GGTTGCCATGGCGAC | GTCGCCATGGCAACC |
| RARG_Rarg_3_SELEX\|RARG_9 | AAGGTCACGAAAGGTC | TGACCTTTCGTGACCTT |
| | A | |
| HOXA3_2 | GTTAATTACCTCCA | TGGAGGTAATTAAC |
| MYOD1_Myf6_3824_PBM | ACACCTGTC | GACAGGTGT |
| HNF4G_HNF4A_6_SELEX\|HNF4_known21 | GGGTCCAAAGGTCAA | TTGACCTTTGGACCC |
| RELA_GM10847_NFKB_Stanford_ChIP-seq | AGGGGATTTCCCAG | CTGGGAAATCCCCT |
| TATA_known4 | GTATAAA | TTTATAC |
| FOXD1_FOXK1_1_SELEX\|FOXK1_2 | ATTGTGTCCG | CGGACACAAT |
| ATF5_pTH1014_PBM | AGTTACGTAATTG | CAATTACGTAACT |
| ZBTB7C_ZBTB7C_1_SELEX\|ZBTB7B_ZBTB76_1_SELEX\|ZBTB | GCGACCACCGAA | TTCGGTGGTCGC |
| 7A_known4\|ZBTB7C_1 | | |
| RARG_Rarg_1_SELEX\|RARG_7 | AAGGTCAAAAGGTCAA | TTGACCTTTTGACCTT |
| SOX10_2 | ACAAAG | CTTTGT |
| FOXO6_FOXO4_1_SELEX\|FOXO6_FOXO1_2_SELEX\|FOXO6 | GTAAACATGTTTAC | GTAAACATGTTTAC |
| FOXO3_1_SELEX\|FOXO6_FOXO6_1_SELEX\|FOXO1_4\|FOX | | |
| O3_4\|FOXO4_3\|FOXO6_1 | | |
| BCL_disc9 | CTGCACCCGCTGCC | GGCAGCGGGTGCAG |
| HDAC2_disc1 | CAGATAAGGC | GCCTTATCTG |
| USF2_MA0526.1_ChIP-seq | GGTCACATGAC | GTCATGTGACC |
| FOSL1_pTH5108_PBM\|ATF3_pTH5018_PBM | ACGTCATC | GATGACGT |
| ESRRG_ERR_SANGER_5_FBgn0035849_B1H\|ESRRG_pTH38 | CAAGGTCA | TGACCTTG |
| 41_PBM\|NR5A1_pTH3468_PBM\|NR5A1_Mw160_ChIP- | | |
| seq\|NR5A1_1 | | |
| AHR_2 | CTTGCGTGAGA | TCTCACGCAAG |
| E2F3_E2F2_1022_PBM | ACGCGCCAAA | TTTGGCGCGT |
| PAX6_4 | GTCAATTAATTAATCA | TGATTAATTAATTGAC |
| HES4_pTH5059_PBM\|HES7_pTH5260_PBM | GACGCGTGCC | GGCACGCGTC |
| BARX1_BARX1_2_SELEX\|BARX1_3 | CTAATTGC | GCAATTAG |
| HESX1_HESX1_f1_HocoMoco | AGGCCACGTGCCGGAT | ATCCGGCACGTGGCCT |
| SRF_V$SRF_C16_Transfac\|SRF_known2 | GGCCATATAAGGAC | GTCCTTATATGGCC |
| ZNF410_ZNF410_1_SELEX\|ZNF410_2 | GAGTATTATGGGATGG | TCCATCCCATAATACTC |
| | A | |
| NKX3-1_3 | ATCCTTAAGTGGTTAAG | CTTAACCACTTAAGGAT |
| ETS_known4 | ACAGGAAGTGATTGC | GCAATCACTTCCTGT |
| NR4A2_NR4A2_3_SELEX\|NR4A_known4 | TGACCTTTAAA | TTTAAAGGTCA |
| HOXC10_HOXC11_4_SELEX\|HOXC10_HOXC11_2_SELEX\|H | AGCAATAAAAA | TTTTTATTGCT |
| OXC11_3\|HOXC11_5 | | |
| TBX1_TBX1_2_SELEX\|TBX1_TBX20_2_SELEX\|TBX22_TBX15 | AGGTGTGAAATTCACAC | AGGTGTGAATTTCACAC |
| _1_SELEX\|TBX15_1\|TBX1_2\|TBX20_2 | CT | CT |
| BCL_disc5 | CTGATAAG | CTTATCAG |
| POU2F2_MA0507.1_ChIP-seq | ATATGCAAATGAA | TTCATTTGCATAT |
| IRX3_Irx3_0920_PBM | ATCATGTAAT | ATTACATGAT |
| MYB_6 | AAAATAACGGTTTCCAT | ATGGAAACCGTTATTTT |
| POU3F3_GM12891_POU2F2_HudsonAlpha_ChIP- | ATATGCAAATGAG | CTCATTTGCATAT |
| seq\|POU3F3_GM12891_OCT2_HudsonAlpha_ChIP-seq | | |
| GSC_GSC2_1_SELEX\|GSC2_1 | CCTAATCCGC | GCGGATTAGG |
| SRF_known5 | CATCTCCTTATATGG | CCATATAAGGAGATG |
| LHX1_pTH6478_PBM | CTAATTACGC | GCGTAATTAG |
| AR_NR3C2_1_SELEX\|NR3C2_1 | GGGAACACAATGTTCCC | GGGAACATTGTGTTCCC |
| KLF4_MA0039.2_ChIP-seq\|KLF4_1 | GCCCCACCCA | TGGGTGGGGC |
| LIN54_pTH8399_PBM | ATTCAAAT | ATTTGAAT |
| BCL6_SRP001843_Bc16_IgG_LPSstim_ChIP-seq | AGGAGAGAAGGGGAA | TCTCCCTTTCTTCCCTTCC |
| | GGGAAGAAAGGGAGA | CCTTCTCTCCT |
| RREB1_V$RREB1_01_Transfac\|RREB1_1 | CCCCAAACCACCCC | GGGGTGGTTTGGGG |
| SOX7_1 | AATAAAGAACAATAGAA | TGAAATTCTATTGTTCTT |
| | TTTCA | TATT |
| HIC1_5 | ATGCCAACC | GGTTGGCAT |
| BSX_1 | CAGGTAATTACCTCAG | CTGAGGTAATTACCTG |
| AP1_disc8 | AAGGAAATGA | TCATTTCCTT |
| POU3F3_POU3F3_1_SELEX\|POU3F3_2 | AAATTAGCATAAT | ATTATGCTAATTT |
| SRF_known8 | TTCCATATATGGAA | TTCCATATATGGAA |
| PURA_PURA_f1_HocoMoco | CCCTGCCCCCCCCTTCC | GGAAGGGGGGGGCAG |
| | | GG |
| HMX2_1\|HMX3_2 | ACAAGCAATTAAAGAAT | ATTCTTTAATTGCTTGT |
| SCRT2_SCRT2_1_SELEX\|SCRT2_1 | ATGCAACAGGTGG | CCACCTGTTGCAT |
| C11orf9_pTH8654_PBM\|C11orf9_pTH9310_PBM | TGGTACCA | TGGTACCA |
| SOX9_SOX8_7_SELEX\|SOX9_SOX8_2_SELEX\|SOX8_3\|SOX8 | ATGAATTGCAGTC | GACTGCAATTCAT |
| 8 | | |
| SETDB1_disc2 | GCGCACGCGC | GCGCGTGCGC |
| PBX3_disc3 | AGTGACAGGCCCGCCG | TTGGCCGGCGGGCCTGT |
| | GCCAA | CACT |
| E2F6_MA0471.1_ChIP-seq\|E2F4_MA0470.1_ChIP-seq | CCTTCCCGCCC | GGGCGGGAAGG |
| ATF3_JDP2_4_SELEX\|ATF3_Jdp2_2_SELEX\|XBP1_XBP1_1_ | GATGACGTCATC | GATGACGTCATC |
| SELEX\|ATF3_JDP2_2_SELEX\|JDP2_3\|JDP2_5\|JDP2_7\|XBP1 | | |
| 3 | | |
| HOXC5_HXB6_f1_HocoMoco | AATGATTGATGCA | TGCATCAATCATT |
| KLF14_KLF14_1_SELEX\|KLF14_1 | AAGGGGGCGTGGCC | GGCCACGCCCCCTT |
| FOXK1_1 | AAAATGTAAACAAACAG | CTGTTTGTTTACATTTT |
| HOXC10_Hoxc10_1_SELEX\|HOXC10_5 | GTCATAAAAA | TTTTTATGAC |
| YY1_phol_SOLEXA_5_FBgn0035997_B1H | AACAAAATGGCGGCC | GGCCGCCATTTTGTT |
| ESR2_V$ER_C16_Transfac\|ESRRA_known1 | ACAGGTCACTGTGACCT | TCAGGTCACAGTGACCT |
| | GA | GT |
| RARG_Rara_1_SELEX\|RARA_8 | AAAGGTCAAGAGAGGT | TGACCTCTCTTGACCTTT |
| | CA | |
| EGR1_known5 | CCGCCCACGCA | TGCGTGGGCGG |
| CENPB_CENPB_1_SELEX\|CENPB_1 | CCCGCATACAACGAA | TTCGTTGTATGCGGG |
| BATF_disc2 | AAGTTTCAC | GTGAAACTT |
| TCF4_Fer1_da_SANGER_10_FBgn0000413_B1H\|PTF1A_Fe | AACACCTGTCA | TGACAGGTGTT |
| r1_da_SANGER_10_FBgn0037475_B1H | | |
| IRF_disc3 | AAGTGAAAGTGAAAG | CTTTCACTTTCACTT |
| MNT_pTH4588_PBM | GCACGTGCA | TGCACGTGC |
| RXRA_disc5 | AGAGGGCG | CGCCCTCT |
| POU3F3_POU2F1_1_SELEX\|POU2F2_known15 | AATATGCAAATT | AATTTGCATATT |
| PBX3_disc2 | CTGTCACTCA | TGAGTGACAG |
| RELA_GM12891_NFKB_Stanford_ChIP-seq | CTGGGAAATCCCCTA | TAGGGGATTTCCCAG |
| NR2C2_disc1 | TGACCCGGAA | TTCCGGGTCA |
| CUX1_CUX2_1_SELEX\|CUX2_1 | ATCGATAAAATTATCGA | ATCGATAATTTTATCGAT |
| | T | |
| ZNF143_ZN143_si_HocoMoco | GCAAGGCATTCTGGGA | TACACTTCCCAGAATGC |
| | AGTGTA | CTTGC |
| MSX1_Dr_Cell_FBgn0000492_B1H | GACCAATTA | TAATTGGTC |
| ATF3_K562_ATF3_Harvard_ChIP-seq | GGTGACGTGA | TCACGTCACC |
| MYC_known12 | CACGTGC | GCACGTG |
| SP2_disc1 | AGCCAATGGGA | TCCCATTGGCT |
| ETV5_HeLa-53_GABP_HudsonAlpha_ChIP-seq | GAACCGGAAGTGGC | GCCACTTCCGGTTC |
| NFY_disc1 | ACCAGCCAATCAGAG | CTCTGATTGGCTGGT |
| TFAP4_4 | ACCAGCTGC | GCAGCTGGT |
| PAX9_GM12891_PAX5C20_HudsonAlpha_ChIP-seq | CAGCCAAGCGTGACC | GGTCACGCTTGGCTG |
| FOXO6_V$FOXO1_01_Transfac\|FOXO1_1 | CATAAACAAA | TTTGTTTATG |
| SPI1_known1 | AGAGGAAG | CTTCCTCT |
| BARX1_BARX2_si_HocoMoco | CAATTAATGA | TCATTAATTG |
| MAX_MAX_2_SELEX\|MYC_known21 | ACCACGTGCT | AGCACGTGGT |
| HSF1_HepG2_HSF1_Stanford_ChIP-seq | GGGATTCGAACCCGGG | GTCCCGGGTTCGAATCC |
| | AC | C |
| RELA_GM18526_NFKB_Stanford_ChIP-seq | AAGGGGATTTCCAAA | TTTGGAAATCCCCTT |
| STAT_known13 | CATTTCTA | TAGAAATG |
| VDR_VDR_f1_HocoMoco\|RARG_RARA_f1_HocoMoco\|RAR | GAGGTCA | TGACCTC |
| G_RARGJ1_HocoMoco\|RORB_pTH5508_PBM | | |
| RELA_GM18505_NFKB_Stanford_ChIP-seq | AAGGGGATTTCCAAG | CTTGGAAATCCCCTT |
| FOXP4_FOXP2_si_HocoMoco | AGTAAACAA | TTGTTTACT |
| CTCF_AG10803_CTCF_UW_ChIP-seq | GCCACTAGAGGGC | GCCCTCTAGTGGC |
| NFATC1_NFAC3_f1_HocoMoco | AGTTTTCCA | TGGAAAACT |
| HOXA4_GSX2_1_SELEX\|GSX2_2\|HOXB5_2 | ACTAATTAAA | TTTAATTAGT |
| HOXC5_HOXB5_1_SELEX | ACTAATTAAG | CTTAATTAGT |
| TP73_GSE15704_TP73_vehicle_ChIP-seq | GGACATGCCCAGGCAT | GGCATGCCTGGGCATGT |
| | GCC | CC |
| FOXJ1_2 | AAAGTAAACAAAAATT | AATTTTTGTTTACTTT |
| ZNF740_Zfp740_0925_PBM | CCCCCCCACG | CGTGGGGGGG |
| ZNF740_pTH2857_PBM | CCCCCCCACA | TGTGGGGGGG |
| YY2_pho_FlyReg_FBgn0002521_B1H | GAAGCCATAACGGC | GCCGTTATGGCTTC |
| FOXD1_FOXB1_2_SELEX\|FOXB1_2 | TATGTAAATATTGACAT | TATGTCAATATTTACATA |
| | A | |
| E2F_known161E2F_known20 | CGCGCCAAA | TTTGGCGCG |
| ENSG00000250096_RUNX3_2_SELEX\|ENSG00000250096_ | AAACCGCAAA | TTTGCGGTTT |
| RUNX3_4_SELEX\|RUNX3_2\|RUNX3_4 | | |
| RFX8_MA0600.1_ChIP-seq | CCGCGGTTGCCATGGCA | GTTGCCATGGCAACCGC |
| | AC | GG |
| KLF4_CG12029_SANGER_10_FBgn0035454_B1H | GCCACACCCAC | GTGGGTGTGGC |
| XBP1_pTH5019_PBM | ACACGTCAC | GTGACGTGT |
| HMX1_HMX3_1_SELEX\|HMX3_3 | AGCAATTAACA | TGTTAATTGCT |
| NRF1_known1 | CGCATGCGCA | TGCGCATGCG |
| AP1_disc10 | CCCGCCCCCC | GGGGGGCGGG |
| USF2_USF2_f1_HocoMoco | GCCCACGTGAC | GTCACGTGGGC |
| NFE2_N F2L2_si_HocoMoco | CATGACTCAGCA | TGCTGAGTCATG |
| ETV4_1 | ACATCCT | AGGATGT |
| CR936877.3_RXRGJ1_HocoMoco | GGTCAAAGGTCAC | GTGACCTTTGACC |
| REST_disc1 | GTCCATGGTGCTGAA | TTCAGCACCATGGAC |
| ZBTB1_pTH2366_PBM | GTCCCGCAAC | GTTGCGGGAC |
| OVOL1_ovo_SOLEXA_5_FBgn0003028_B1H | AGTACCGTTATTTG | CAAATAACGGTACT |
| PAX9_PAX9_1_SELEX\|PAX9_PAX1_1_SELEX\|PAX1_2\|PAX9 | CGTCACGCATGACTGCA | TGCAGTCATGCGTGACG |
| _1 | | |
| STAT2_K562_STAT2_Stanford_ChIP-seq | GAAAATGAAACTGAA | TTCAGTTTCATTTTC |
| PTEN_1 | CCCCAAGTGAAGG | CCTTCACTTGGGG |
| RARG_RARG_3_SELEX\|RARG_3 | AAGGTCACCAGAGGTC | TGACCTCTGGTGACCTT |
| | A | |
| TFAP2A_TFAP2C_2_SELEX\|TFAP2A_TFAP2C_6_SELEX\|TFA | AGCCTCAGGCA | TGCCTGAGGCT |
| P2A_TFAP26_2_SELEX\|TFAP26_31TFAP2_known15\|TFAP2 | | |
| _known19 | | |
| LBX2_LBX2_1_SELEX\|LBX2_2 | CTCGACCTAATTA | TAATTAGGTCGAG |
| PAX9_pTH8679_PBM | CAGTCAAGCG | CGCTTGACTG |
| NR3C1_known10 | CCCCCAAGAACACCATG | GGGGGGGGGACATGGT |
| | TCCCCCCCCC | GTTCTTGGGGG |
| GFI16_1 | TAAATCACTGCA | TGCAGTGATTTA |
| FOXD1_Foxg1_2_SELEX\|FOXG1_4 | CCGGACACAATC | GATTGTGTCCGG |
| DMBX1_ARX_1_SELEX\|DMBX1_CART1_1_SELEX\|ARX_2\|A | TTAATTAAATTAA | TTAATTTAATTAA |
| LX1_6 | | |
| REST_MA0138.2_ChIP-seq\|REST_PANC- | GGCGCTGTCCATGGTGC | TTCAGCACCATGGACAG |
| 1_NRSF_HudsonAlpha_ChIP-seq\|REST_known4 | TGAA | CGCC |
| RFX8_HeLa-S3_RFX5_Stanford_ChIP-seq | CCTAGCAACAGATGA | TCATCTGTTGCTAGG |
| SIX5_Six4_SOLEXA_FBgn0027364_B1H | AATTGATA | TATCAATT |
| TP63_P63_si_HocoMoco | GAGACATGTCC | GGACATGTCTC |
| HINFP_MA0131.1_SELEX\|HINFP_1 | GCGGACGTTA | TAACGTCCGC |
| MITF_MITF_f1_HocoMoco | ATCACATGAC | GTCATGTGAT |
| PAX9_V$PAX5_01_Transfac\|PAX5_known1 | GGGGCGGCTACGCATC | TCGAGGCGCAATGATGC |
| | ATTGCGCCTCGA | GTAGCCGCCCC |
| NR3C1_known12 | TCGTGCTCA | TGAGCACGA |
| BHLHE40_Bhlhb2_2_SELEX | AGCACGTGAC | GTCACGTGCT |
| FOXD1_T-47D_FOXA1_HudsonAlpha_ChIP-seq | CTGAGTAAACA | TGTTTACTCAG |
| LMO2_1 | CGCCAGGTGCAG | CTGCACCTGGCG |
| HMX1_Hmx1_3423_PBM | AAGCAATTAA | TTAATTGCTT |
| BHLHE40_disc2 | CAGCAGCCGCCGGCGC | CGCGCCGGCGGCTGCT |
| | G | G |
| IRX2_1 | AATTTTACATGTATTTA | TAAATACATGTAAAATT |
| ESR2_pTH6055_PBM | CAGGTCAA | TTGACCTG |
| TCF4_pTH4580_PBM | GAACACCTGC | GCAGGTGTTC |
| HOXC5_I$UBX_01_Transfac | ACGAAGCCATTAAGCCC | GAGGGCTTAATGGCTTC |
| | TC | GT |
| STAT_known10 | GATTTCCC | GGGAAATC |
| EGR3_EGR3_1_SELEX\|EGR3_EGR2_2_SELEX\|EGR1_known | AGTGCGTGGGCGTAG | CTACGCCCACGCACT |
| 11\|EGR3_2 | | |
| E2F3_E2F3_3_SELEX\|E2F_known26 | AATTTTGGCGCCAAAAC | AGTTTTGGCGCCAAAAT |
| | T | T |
| IRF6_1 | ACTTTGGTTTCGATCAG | CTGATCGAAACCAAAGT |
| NFATC1_NFATC1_1_SELEX\|NFATC1_1 | AATGGAAAATTATTTTC | AGGGAAAATAATTTTCC |
| | CCT | ATT |
| NROB1_NROB1_si_HocoMoco | GCGTGGGAGA | TCTCCCACGC |
| HIC1_HIC1_si_HocoMoco | GGGCAACCC | GGGTTGCCC |
| TCF4_net_da_SANGER_10_FBgn0000413_B1H\|ATOH8_net | ACAGGTGGT | ACCACCTGT |
| _da_SANGER_10_FBgn0002931_B1H\|SCRT1_CG17181_SA | | |
| NGER_5_FBgn0035144_B1H | | |
| CREB3L1_CREB3_2_SELEX\|CREB3_2 | GTGCCACGTCATCA | TGATGACGTGGCAC |
| CEBPA_pTH5250_PBM | ATTGCGTAA | TTACGCAAT |
| TBX3_TBX2_f1_HocoMoco | GTCGCTTCTCACACCTCT | TGCCATCAGAGGTGTGA |
| | GATGGCA | GAAGCGAC |
| NR3C1_known14 | GGGAACATTATGTCCTA | TTAGGACATAATGTTCC |
| | A | C |
| XBP1_V$XBP1_01_Transfac\|XBP1_1 | ATAGGACACGTCATCAT | ATGATGACGTGTCCTAT |
| ESR2_pTH3510_PBM | GAGGTCATGC | GCATGACCTC |
| TEAD1_TEAD1_f1_HocoMoco | CACATTCCTGCGCC | GGCGCAGGAATGTG |
| EMX2_EMX1_2_SELEX\|EMX2_E MX2_2_SELEX\|EMX1_2\|E | TAATTAGCTAATTA | TAATTAGCTAATTA |
| MX2_3 | | |
| YY2_YY2_1_SELEX\|YY2_1 | GTCCGCCATTA | TAATGGCGGAC |
| NKX2-5_vnd_FlyReg_FBgn0003986_B1H | GCACTTGAGC | GCTCAAGTGC |
| ESR2_MA0258.2_ChIP-seq\|ESRRA_disc1 | AGGTCACCCTGACCT | AGGTCAGGGTGACCT |
| EGR3_pTH5337_PBM | ATGCGTGGG | CCCACGCAT |
| GATA2_Gata6_3769_PBM\|GATA2_GATA2_si_HocoMoco\| | CAGATAAG | CTTATCTG |
| HMGN3_disc2 | | |
| POU1F1_POU1F1_1_SELEX\|POU1F1_4 | CATTAATTATGCATGAG | CTCATGCATAATTAATG |
| YY2_H1-hESC_YY1_HudsonAlpha_ChIP-seq | CAAGATGGCGGCCCC | GGGGCCGCCATCTTG |
| HNF1A_HNF1B_2_SELEX\|HNF1A_HNF1A_1_SELEX\|HNF1A | AGTTAATCATTAACT | AGTTAATGATTAACT |
| _4\|HNF1B_4 | | |
| FOSL1_HepG2_FOSL2_HudsonAlpha_ChIP-seq | CAGGATGAGTCACC | GGTGACTCATCCTG |
| IRF6_Irf6_3803_PBM | GACCGAAACC | GGTTTCGGTC |
| MSX1_Msx3_3206_PBM\|MSX1_Msx2_3449_PBM\|NOBOX | ACCAATTA | TAATTGGT |
| _MA0125.1_SELEX\|NOBOX_1 | | |
| NKX2-5_Ceh-22_PBM\|ISL2_ISL2_1_SELEX\|ISL2_2 | GCACTTAA | TTAAGTGC |
| FOXD1_MA0042.1_SELEX\|FOXI1_2 | AAACAAACATCC | GGATGTTTGTTT |
| TFAP2E_1 | ATCGCCTCAGGCAAT | ATTGCCTGAGGCGAT |
| ARID3C_ARI3A_f1_HocoMoco | AATTAAA | TTTAATT |
| CUX1_V$CDPCR3_01_Transfac\|CUX1_4 | CACCAATATGTATGG | CCATACATATTGGTG |
| MYC_known14 | GACCACGTGGTC | GACCACGTGGTC |
| TBX3_SRP001585_Tbx2_ChIP-seq | AAACTACAATTCCCAGA | GCATTCTGGGAATTGTA |
| | ATGC | GTTT |
| POU3F2_4 | CAAACTAATTAATTATC | GATAATTAATTAGTTTG |
| USF1_pTH5265_PBM | ACCACGTGAT | ATCACGTGGT |
| HES4_dpn_SANGER_10_FBgn0010109_B1H | GGCACGTGCCA | TGGCACGTGCC |
| MYBL1_Mybl1_1717_PBM | TAACGGTCA | TGACCGTTA |
| KIAA0415_pTH9655_PBM | ATTGTAAACAAA | TTTGTTTACAAT |
| TCF4_MA0521.1_ChIP-seq | AACAGCTGCAG | CTGCAGCTGTT |
| ETV5_HeLa-53_ELK4_UCD_ChIP-seq | CACTTCCGGCC | GGCCGGAAGTG |
| NKX2-5_Vnd_SOLEXA_FBgn0003986_B1H\|NKX2- | CACTTGAG | CTCAAGTG |
| 6_Tin_Cell_FBgn0004110_B1H | | |
| SOX18_SOX18_1_SELEX\|SOX18_2 | AACAATGAAATTGTT | AACAATTTCATTGTT |
| TCF7L2_known5 | AATCCCTTTGATCTATC | GATAGATCAAAGGGATT |
| HNF4G_HNF4A_1_SELEX\|HNF4_known16 | GAGTCCAAAGTCCATC | GATGGACTTTGGACTC |
| GMEB2_GME B2_3_SELEX\|GMEB2_3 | TACGTAACTGACGTA | TACGTCAGTTACGTA |
| HOXC5_Hoxd3_1742_PBM\|HOXC10_Hoxc10_2779_PBM | GTCATTAA | TTAATGAC |
| ATF7_Creb5_1_SELEX\|CREB5_1 | AATGACGTCACC | GGTGACGTCATT |
| CR936877.3_I$CF1_02_Transfac\|CR936877.3_I$CF1_01_Tr | CGTGACCCC | GGGGTCACG |
| ansfac | | |
| VDR_2 | CCCGGTGAACCC | GGGTTCACCGGG |
| GATA2_GATA3_si_HocoMoco | CTTATCTC | GAGATAAG |
| LHX1_MA0135.1_SELEX\|LHX3_2 | AAATTAATTAATC | GATTAATTAATTT |
| GMEB1_pTH9026_PBM\|GMEB1_pTH8745_PBM | CGTACGTCA | TGACGTACG |
| SMAD4_1 | AGGTGGCTGCCCCAC | GTGGGGCAGCCACCT |
| ETS_disc8 | AACGGAAG | CTTCCGTT |
| FUBP1_FUBP1_f1_HocoMoco | AAAAAAACACAA | TTGTGTTTTTTT |
| ZNF143_GM12878_ZNF143_Stanford_ChIP-seq | CTGGGAATTGTAGTC | GACTACAATTCCCAG |
| NKX3-1_V$NKX3A_01_Transfac\|NKX3-1_1 | AAATAAGTATAT | ATATACTTATTT |
| NR2E1_pTH2936_PBM | AAAGTCAATT | AATTGACTTT |
| ZBTB7A_known1 | AGGGCCCCC | GGGGGCCCT |
| MSX1_2 | GAATTAATTAGTTGCA | TGCAACTAATTAATTC |
| HOXD10_1 | AATGCAATAAAATTTAT | ATAAATTTTATTGCATT |
| ETS_disc6 | AAATCTCGCG | CGCGAGATTT |
| TFAP2_known4 | CCCTCCGCCTGGGGGC | GCCCCCAGGCGGAGGG |
| TBX20_pTH9340_PBM | AGGTGTCA | TGACACCT |
| FOXJ3_YIL131C_2002_DeBoer11 | ATGTAAACAAGC | GCTTGTTTACAT |
| SOX1_SOX2_3_SELEX\|SOX2_4 | CATCAATAACATTGATC | GATCAATGTTATTGATG |
| CTCF_GM12878_CTCF_UW_ChIP-seq | GCCACCAGGGGGCGCC | TGGCGCCCCCTGGTGGC |
| | A | |
| GATA2_GATA1_si_HocoMoco | ACAGATAAGG | CCTTATCTGT |
| RAD21_disc2 | CCACTAGA | TCTAGTGG |
| GATA2_K562_GATA2_UChicago_ChIP-seq | ACAGATAAGA | TCTTATCTGT |
| NKX2-1_2 | CCCTCAAGAGCC | GGCTCTTGAGGG |
| SNAI2_wor_SANGER_2.5_FBgn0001983_B1H\|ASCL2_I_1_s | CACCTGC | GCAGGTG |
| c_da_SANGER_5_FBgn0002561_B1H\|TCF4_ase_da_SANGE | | |
| R_10_FBgn0000413_B1H\|TCF4_I_1_sc_da_SANGER_5_FBg | | |
| n0000413_B1H | | |
| HOXB7_1 | GTAGTAATTAATGCAA | TTGCATTAATTACTAC |
| POU5F1_disc2 | ATGAATATGC | GCATATTCAT |
| FOXD1_FOXG1_1_SELEX\|FOXG1_1 | ATAAACAATTGTAAACA | TGTTTACAATTGTTTAT |
| HAND1_2 | ATGCCAGACC | GGTCTGGCAT |
| AR_pTH1739_PBM | TAGGAACATA | TATGTTCCTA |
| FOXP4_CG16899_SANGER_5_FBgn0037735_B1H | GATAAACAA | TTGTTTATC |
| HNF1_3 | ACTGTTAATTATTAACCA | TGGTTAATAATTAACAG |
| | | T |
| SREBF2_pTH0914_PBM | ATCACGCGAT | ATCGCGTGAT |
| IRF_known13 | CAAAATCGAAACTAA | TTAGTTTCGATTTTG |
| TCF4_ITF2_f1_HocoMoco | CCAGGTGCA | TGCACCTGG |
| NFKB_disc3 | AAATCCCCTC | GAGGGGATTT |
| OSR2_Osr2_1727_PBM | AACGGTAGCA | TGCTACCGTT |
| NR1H3_NR1H4_f1_HocoMoco | AGGGTCAATGACCT | AGGTCATTGACCCT |
| IRF_known5 | AAAATGAAACTG | CAGTTTCATTTT |
| HMGA2_pTH9279_PBM | AGAAAAAT | ATTTTTCT |
| EGR3_EGR2_1_SELEX\|EGR1_known10 | ACGCCCACGCA | TGCGTGGGCGT |
| NR2E1_pTH5561_PBM | AATTGACAT | ATGTCAATT |
| PITX2_2 | GATGATTAATCCCTTCA | TGAAGGGATTAATCATC |
| POU3F3_pTH9365_PBM | ATAATGAA | TTCATTAT |
| TCF4_HLH54F_da_SANGER_5_FBgn0000413_B1H\|MSC_HL | AACACCTGTTG | CAACAGGTGTT |
| H54F_da_SANGER_5_FBgn0022740_B1H | | |
| HBP1_HBP1_f1_HocoMoco | ACTCATTGA | TCAATGAGT |
| HNF4G_Hnf4_SANGER_5_FBgn0004914_B1H\|NR2F2_NR2 | GGGGTCAA | TTGACCCC |
| F1_3_SELEX\|HNF4_known25 | | |
| TFAP2B_1 | ATGCCCTAGGGCAA | TTGCCCTAGGGCAT |
| CR936877.3_pTH2861_PBM\|CR936877.3_pTH2880_PBM\| | GGGGTCAC | GTGACCCC |
| NR2F2_pTH5516_PBM | | |
| AFP_1 | ATTAACTACAC | GTGTAGTTAAT |
| OLIG2_Oli_da_SANGER_5_2_FBgn0032651_B1H\|TCF4_Oli | ACCGCACCATCTGTC | GACAGATGGTGCGGT |
| _da_SANGER_5_2_FBgn0000413_B1H | | |
| NFATC1_NFAC1_si_HocoMoco | AATTTTCCATTG | CAATGGAAAATT |
| ETV5_V$ELK1_02_Transfac\|ETS_known2 | CCAACCGGAAGTCC | GGACTTCCGGTTGG |
| TCF4_tap_da_SANGER_5_FBgn0000413_B1H\|NEUROG1_t | CCATATGTCAC | GTGACATATGG |
| ap_da_SANGER_5_FBgn0015550_B1H | | |
| GFI1_2 | CGAAATCACGGCC | GGCCGTGATTTCG |
| NKX2-5_MA0122.1_SELEX\|N KX3-2_1 | TCCACTTAA | TTAAGTGGA |
| MXI1_HeLa-S3_MXI1_Stanford_ChIP-seq | CACGTGGTTCC | GGAACCACGTG |
| EVX2_1 | AACGCTAATTAGCGGTG | CACCGCTAATTAGCGTT |
| ETV5_MA0098.2_ChIP-seq | CCCACTTCCTGTCTC | GAGACAGGAAGTGGG |
| RXRA_disc2 | CGGCCACCAGGGGGCG | TCCGGCGCCCCCTGGTG |
| | CCGGA | GCCG |
| MEIS1::HOXA9_2 | CCATAAAACTGTCA | TGACAGTTTTATGG |
| IRX3_Irx6_2623_PBM | ATTACAA | TTGTAAT |
| SOX13_MA0515.1_ChIP-seq | AAAACAATGG | CCATTGTTTT |
| OBOX5_1 | GAAATTTAATCCCTCTA | TAGAGGGATTAAATTTC |
| ZNF410_1 | TATTATGGGATGGATAA | TTATCCATCCCATAATA |
| GATA_known18 | CAATTCTTATCTCTATA | TATAGAGATAAGAATTG |
| MITF_Mitf_SANGER_5_FBgn0263112_B1H | CACGTGA | TCACGTG |
| SCXA_CG33557_da_SANGER_5_FBgn0053557_B1H\|TCF4_ | CCAGATGGCACGGACA | TGTTGTGTCCGTGCCAT |
| CG33557_da_SANGER_5_FBgn0000413_B1H | CAACA | CTGG |
| SMC3_disc3 | CCAGGGGGCGC | GCGCCCCCTGG |
| ALX1_PRRX1_3_SELEX\|PROP1_PROP1_2_SELEX\|PROP1_31 | TAATCTAATTA | TAATTAGATTA |
| PRRX1_4 | | |
| ZBTB42_ZN238_a_HocoMoco | GCGAAACATCTGGA | TCCAGATGTTTCGC |
| MAX_Max_Mnt_SANGER_5_FBgn0017578_B1H\| MYC_kno | CACGTGG | CCACGTG |
| wn17 | | |
| MTF1_MTF1_f1_HocoMoco | AGTGCCGTGTGCAAAAC | GTTTTGCACACGGCACT |
| PAX2_PAX2_si_HocoMoco | GCATGAC | GTCATGC |
| SIX5_known4 | ATAAGTGATACCCTATC | GATAGGGTATCACTTAT |
| NOBOX_pTH5791_PBM | ACCAATTAAG | CTTAATTGGT |
| BSX_pTH6569_PBM\|ESX1_ESX1_1_SELEX\|GBX2_Gbx1_1_S | ACCAATTAAC | GTTAATTGGT |
| ELEX\|ESX1_ESX1_2_SELEX\|ESX1_2\|ESX1_3\|GBX1_3 | | |
| TCF4_amos_da_SANGER_10_FBgn0000413_B1H\|ATOH7_a | ACCATCTGCCG | CGGCAGATGGT |
| mos_da_SANGER_10_FBgn0003270_B1H | | |
| SP9_SP4_f1_HocoMoco | CGGCCCCGCCCCCCCCC | GGGGCCAGGGGGGGG |
| | TGGCCCC | GCGGGGCCG |
| NPAS3_EPAS1_si_HocoMoco | CCCACGTACGCAC | GTGCGTACGTGGG |
| ESRRG_ERR2_f1_HocoMoco\|NR5A1_STF1_f1_HocoMoco\| | TCAAGGTCA | TGACCTTGA |
| ESRRG_ERR1_f1_HocoMoco\|ESRRG_ERR3_f1_HocoMoco\| | | |
| NR5A1_2 | | |
| DOBOX5_1 | GATAATTAATCCCTTCC | GGAAGGGATTAATTATC |
| HOXC6_Hoxc8_3429_PBM | GGCAATTAA | TTAATTGCC |
| NFE2_NFE2_f2_HocoMoco | AGCATGACTCAGCA | TGCTGAGTCATGCT |
| MYC_known15 | AACCACGTGA | TCACGTGGTT |
| MXI1_disc2 | AACCACGTGG | CCACGTGGTT |
| ELF3_Elf3_PBM | ACCCGGAAAT | ATTTCCGGGT |
| RORB_MA0072.1_SELEX\|RORA_5 | TATAAGTAGGTCAA | TTGACCTACTTATA |
| ARNT2_pTH5159_PBM | ATTCATGTGC | GCACATGAAT |
| KLF4_KLF1_f1_HocoMoco | CAGGGTGTGGC | GCCACACCCTG |
| HOXA4_zen2_SOLEXA_2_FBgn0004054_B1H | GTCATTAAGA | TCTTAATGAC |
| RARA_1 | CAGGTGACCTTTGAGA | TCTCAAAGGTCACCTG |
| NRF1_disc3 | CCCCGCCCGC | GCGGGCGGGG |
| FOXD1_Foxg1_1_SELEX\|FOXG1_3 | ATAAACAAGTGTAAACA | TGTTTACACTTGTTTAT |
| GCM1_pTH9386_PBM\|GCM1_pTH9259_PBM\|GCM1_pTH | ACCCGCAT | ATGCGGGT |
| 8361_PBM | | |
| SP9_Sp1_SOLEXA_2.5_FBgn0020378_B1H | AAGTGGGCGTGGCC | GGCCACGCCCACTT |
| SIN3A_disc5 | CAGCACCAGG | CCTGGTGCTG |
| POU3F3_GM12878_OCT2_HudsonAlpha_ChIP- | ATATGCAAAT | ATTTGCATAT |
| seq\|POU3F3_GM12878_POU2F2_HudsonAlpha_ChIP- | | |
| seq\|NANOG_disc1\|TATA_disc9 | | |
| E2F6_E2F6_f1_HocoMoco | CCTTCCCGCCCA | TGGGCGGGAAGG |
| NR2F2_COT2_f1_HocoMoco\|RXRA_disc1 | CAAAGGTCAA | TTGACCTTTG |
| NR4A2_NR4A3_f1_HocoMoco | CAAAGGTCAG | CTGACCTTTG |
| JUN_MA0489.1_ChIP-seq | AGGAGATGACTCAT | ATGAGTCATCTCCT |
| HOXC5_Ipf1_3815_PBM | CTAATGGC | GCCATTAG |
| ENSG00000250096_RUNX2_2_SELEX\|ENSG00000250096_ | TAACCGCAAAAACCGCA | TTGCGGTTTTTGCGGTT |
| RUNX3_3_SELEX\|RUNX2_5\|RUNX3_3 | A | A |
| JUN_K562_JUND_UChicago_ChIP-seq | AAGTATGAGTCATCA | TGATGACTCATACTT |
| WT1_1 | CCCTCCCCC | GGGGGAGGG |
| HNF1A_3 | ATTTTAGTTAACTAAGG | CCTTAGTTAACTAAAAT |
| DRGX_MA0467.1_ChIP-seq | AAGAGGATTAG | CTAATCCTCTT |
| FOSL1_K562_CFOS_UChicago_ChIP-seq | GAGGATGAGTCACCA | TGGTGACTCATCCTC |
| MYB_V$VMYB_02_Transfac | GCCGTTAGA | TCTAACGGC |
| AR_NR3C1_1_SELEX\|NR3C1_known18 | GGGAACATTATGTACCC | GGGTACATAATGTTCCC |
| HOXA5_1 | TGCCAACTCCCCCATTA | TGGAGTCGAGCACTAAT |
| | GTGCTCGACTCCA | GGGGGAGTTGGCA |
| OBOX5_2 | AAGAGGGATTAATTATC | GATAATTAATCCCTCTT |
| PHOX2A_1 | CAGCATTAATTAGTAG | CTACTAATTAATGCTG |
| SOX17_Sox17_2837_PBM | AGGATGAAT | ATTCATCCT |
| ALX1_CG33980_SOLEXA_2_0_FBgn0053980_B1H | CTTAATTAGC | GCTAATTAAG |
| FOXD1_Mw164_ChIP-seq | CTGTTTAC | GTAAACAG |
| GATA_known16 | CTTTATTTCTTATCTCTA | TTTTTAGAGATAAGAAA |
| | AAAA | TAAAG |
| FOSL2_FOSL2_f1_HocoMoco | ATGACTCATCC | GGATGAGTCAT |
| GATA_known7 | AGATAAGGCCT | AGGCCTTATCT |
| NFE2_K562_NFE2_Stanford_ChIP-seq | AAAATTGCTGAGTCATG | CATGACTCAGCAATTTT |
| MYF_1 | CAGCAGCTGCTG | CAGCAGCTGCTG |
| ZEB1_Mv136_ChIP-seq | CACACACCTG | CAGGTGTGTG |
| RORB_MA0071.1_SELEX\|RORA_4 | ATCAAGGTCA | TGACCTTGAT |
| ZBTB33_MA0527.1_ChIP-seq | CAGATCTCGCGAGAG | CTCTCGCGAGATCTG |
| ZEB1_ZEB1_do_HocoMoco\|SNAI2_esg_SANGER_2.5_FBgn | ACAGGTG | CACCTGT |
| 0001981_B1H | | |
| CTCF_HeLa-S3_CTCF_UT-A_ChIP-seq | GCCACCAGGGGGCAC | GTGCCCCCTGGTGGC |
| AL662830.5_PBX1_do_HocoMoco | AATTTGATTGATGGG | CCCATCAATCAAATT |
| BRCA1_known1 | CAACAGAA | TTCTGTTG |
| NKX2-5_Nkx2-9_3082_PBM | AGCACTTAAG | CTTAAGTGCT |
| HOXD3_1 | AGGTTAATTAACTCAA | TTGAGTTAATTAACCT |
| DMRTA2_pTH9188_PBM | AATGTATCAAT | ATTGATACATT |
| TP53_Tp53_1_SELEX\|TP53_5 | ACATGTCCATGGACATG | ACATGTCCATGGACATG |
| | T | T |
| MITF_TFEB_f1_HocoMoco | CACGTGACC | GGTCACGTG |
| POU3F3_pTH9256_PBM\|POU3F3_pTH9297_PBM | ATAATTCATA | TATGAATTAT |
| ZKSCAN3_ZNF306_1_SELEX\|ZKSCAN3_1 | TCGAGGCTAGACCA | TGGTCTAGCCTCGA |
| REST_HTB-11_NRSF_HudsonAlpha_ChIP- | TCAGCACCATGGACA | TGTCCATGGTGCTGA |
| seq\|REST_HepG2_NRSF_HudsonAlpha_ChIP-seq | | |
| SOX1_Sox1_2631_PBM | AAAGATGAAT | ATTCATCTTT |
| NPAS2_pTH5056_PBM | GCCACGTGGC | GCCACGTGGC |
| SOX9_SOX8_8_SELEX\|SOX8_9 | AATCAATTGCAGTGATT | AATCACTGCAATTGATT |
| GCM1_GCM1_3_SELEX\|GCM1_4 | CATGCGGGTAC | GTACCCGCATG |
| HES4_I$HAIRY_01_Transfac | ATGGCGCGTGCCGC | GCGGCACGCGCCAT |
| EN2_EN1_1_SELEX\|EN2_EN2_2_SELEX\|EN1_4\|EN2_3 | CCCAATTAGC | GCTAATTGGG |
| ZNF628_1 | CAAGGTTGGTTGC | GCAACCAACCTTG |
| CTCF_AG04449_CTCF_UW_ChIP-seq | CCACCAGGGGGCGCCG | CGGCGCCCCCTGGTGG |
| SIX5_disc4 | AAAACTACAA | TTGTAGTTTT |
| FOXD1_fkh_NAR_FBgn0000659_B1H\|FOXD1_Mf15_ChIP- | TGTTTGCTTAA | TTAAGCAAACA |
| seq\|FOXD1_MA0446.1_B1H | | |
| DMRT3_1 | AAAATGTATCAAATT | AATTTGATACATTTT |
| NRF1_MA0506.1_ChIP-seq | GCGCCTGCGCA | TGCGCAGGCGC |
| SCRT2_scrt_SANGER_2.5_FBgn0004880_B1H | ACCACCTGTTG | CAACAGGTGGT |
| UBP1_pTH8565_PBM | AACCGGTTA | TAACCGGTT |
| ETV6_ETV6_2_SELEX\|ETV6_2 | AGCGGAAGTG | CACTTCCGCT |
| FOXA_known3 | ATAAACAAACAGA | TCTGTTTGTTTAT |
| FOXD1_FOXJ3_si_HocoMoco | AAAAAATAAACAA | TTGTTTATTTTTT |
| HMBOX1_HM BOX1_1_SELEX\|HMBOX1_2 | ACTAGTTAAC | GTTAACTAGT |
| FOXD1_MA0458.1_B1H\|FOXD1_slp1_NAR_FBgn0003430_ | AATGTAAACAA | TTGTTTACATT |
| B1H | | |
| SOX9_SOX8_5_SELEX\|SOX8_6 | TGAATGTGCAGTCA | TGACTGCACATTCA |
| NFY_known1 | GTGATTGGTTA | TAACCAATCAC |
| JUN_HepG2_JUND_Stanford_ChIP-seq | AAGGTGACGTCATCA | TGATGACGTCACCTT |
| HES4_h_SANGER_5_FBgn0001168_B1H | GGCACGCGCC | GGCGCGTGCC |
| JUN_V$VJUN_01_Transfac | CCGATGACGTCATCCC | GGGATGACGTCATCGG |
| AHR::ARNT_1 | GGGCACGCAACCCTTA | TAAGGGTTGCGTGCCC |
| NFY_known4 | CAGCCAATGAG | CTCATTGGCTG |
| TCF4_V$E47_01_Transfac | CCGGCAGGTGTCCGC | GCGGACACCTGCCGG |
| AP1_known7 | CCCCTTGAGTCA | TGACTCAAGGGG |
| MAFK_MA0495.1_ChIP-seq | AAAAATTGCTGACTCAG | GCTGAGTCAGCAATTTT |
| | C | T |
| KLF4_luna_SANGER_5_FBgn0040765_B1H | GGCAACGCCC | GGGCGTTGCC |
| MAFB_Mafb_2914_PBM | AAATTGCTGACGT | ACGTCAGCAATTT |
| IRF4_IRF4_si_HocoMoco | AAAAAAGAAAATGAAA | TTTCATTTTCTTTTTT |
| HLTF_1 | AACCTTATAT | ATATAAGGTT |
| NHLH2_MA0048.1_SELEX\|NHLH1_3 | ACGCAGCTGCGC | GCGCAGCTGCGT |
| ARID3C_I$DRI_01_Transfac | TATTAATCGA | TCGATTAATA |
| HES4_MA0449.1_B1H\|HES5_pTH5450_PBM\|TCFL5_pTH45 | GGCACGTGCC | GGCACGTGCC |
| 76_PBM\|HES4_h_NAR_FBgn0001168_B1H | | |
| POU2F2_known7 | AAATATGCAAATCAC | GTGATTTGCATATTT |
| AR_V$GRE_C_Transfac\|NR3C1_known2 | CAGAACAGATTGTACC | GGTACAATCTGTTCTG |
| LBX2_MA0232.1_B1H\|GBX2_Exex_SOLEXA_FBgn0041156_ | TAATTA | TAATTA |
| B1H\|DLX1_DII_SOLEXA_FBgn0000157_B1H | | |
| FOXD1_FOXJ3_U_HocoMoco | TAAACAAAAACAA | TTGTTTTTGTTTA |
| YY1_known6 | GATGGC | GCCATC |
| HIVEP3_ZEP2_si_HocoMoco | GGGGTTTCCCTACC | GGTAGGGAAACCCC |
| ATF1_V$CREB_01_Transfac\|ATF3_known2\|ATF2_3\|ATF3_ | TGACGTCA | TGACGTCA |
| known15 | | |
| HNF4_disc2 | AAGTCCAGT | ACTGGACTT |
| HLX_H2.0_SOLEXA_FBgn0001170_B1H | TTAATAAA | TTTATTAA |
| CR936877.3_RXRG_2_SELEX\|CR936877.3_RXRA_4_SELEX\| | GAGGTCATGACCCC | GGGGTCATGACCTC |
| RXRA_known13\|RXRG_2 | | |
| PLAG1_PLAG1_f1_HocoMoco | CCCCTCCTGATGCCCCC | GGGGGCATCAGGAGGG |
| | | G |
| TBPL2_V$TBP_01_Transfac\|TATA_known3 | TATAAATA | TATTTATA |
| SREBF2_V$SREBP1_01_Transfac\|SREBP_known1 | GATCACGTGAC | GTCACGTGATC |
| FOXD1_FOXG1_2_SELEX\|FOXG1_2 | ACGGACACAATG | CATTGTGTCCGT |
| GMEB2_pTH3084_PBM\|GMEB1_pTH9298_PBM\|GMEB1_ | GTACGTCA | TGACGTAC |
| pTH9282_PBM | | |
| NR2F2_2 | CTCGTGACCTTTGAGA | TCTCAAAGGTCACGAG |
| BATF_disc3 | AAATGACTGG | CCAGTCATTT |
| GATA2_V$GATA1_04_Transfac\|GATA_known6 | ATCAGATAAGGGG | CCCCTTATCTGAT |
| FOSL1_pTH5077_PBM | TGATGACGCAA | TTGCGTCATCA |
| GATA_known13 | AGATAG | CTATCT |
| RELA_GM19099_NFKB_Stanford_ChIP-seq | AGGGGATTTCCAA | TTGGAAATCCCCT |
| NFE2_disc4 | CCGCTGACTCC | GGAGTCAGCGG |
| MAFA_MAF_f1_HocoMoco | GTCAGCAA | TTGCTGAC |
| ALX1_Isx_3445_PBM | CAATTAGC | GCTAATTG |
| E2F1_V$E2F_03_Transfac\|E2F_known9 | TTTCGCGCCAAA | TTTGGCGCGAAA |
| ATF1_V$CREB_Q2_Transfac\|ATF3_known6 | CCTTACGTCACC | GGTGACGTAAGG |
| RORB_Hr46_SANGER_5_FBgn0000448_B1H | AAGTAGGTCA | TGACCTACTT |
| FOXD1_FOXC1_1_SELEX\|FOXC1_3 | AAGTAAATAAACA | TGTTTATTTACTT |
| FOXJ1_1 | ATGTGTTTGTTTA | TAAACAAACACAT |
| SOX9_SOX9_3_SELEX\|SOX9_5 | ATCAATGTGCAGTGAT | ATCACTGCACATTGAT |
| HOXB9_1 | CGAATTTTATGGCTCC | GGAGCCATAAAATTCG |
| TBX3_TBX5_1_SELEX\|TBX3_pTH3973_PBM\|TBX3_TBX5_si | AGGTGTGA | TCACACCT |
| HocoMoco\|TBX22_TBX15_2_SELEX\|MGA_MGA_1_SELEX | | |
| \|TBX1_TBX1_3_SELEX\|TBX3_pTH9336_PBM\|TBX3_pTH37 | | |
| 75_PBM\|TBX3_TBX4_1_SELEX\|MGA_1\|TBX15_2\|TBX1_3\| | | |
| TBX4_1\|TBX5_4 | | |
| CDX2_2 | AAATTTTATTACCGTT | AACGGTAATAAAATTT |
| HNF1A_V$HNF1_01_Transfac | GGTTAATGATTACCA | TGGTAATCATTAACC |
| CEBPA_CEBPE_f1_HocoMoco | AAGATTGCGCAA | TTGCGCAATCTT |
| OTP_1 | CCAATTAATTAATTACG | CGTAATTAATTAATTGG |
| HOXC5_Antp_FlyReg_FBgn0000095_B1H | AATTAT | ATAATT |
| ZNF263_T-REx-HEK293_ZNF263_UCD_ChIP-seq | CCTCTCCCTCCTCCC | GGGAGGAGGGAGAGG |
| RELA_REL_do_HocoMoco | GGGAAATCCCCA | TGGGGATTTCCC |
| RELB_RELB_si_HocoMoco | GGGAAATCCCCC | GGGGGATTTCCC |
| SHOX_PhdP_SOLEXA_FBgn0025334_B1H\|SHOX_PhdP_Cell | AATTAA | TTAATT |
| FBgn0025334_B1H | | |
| BCL6_MA0463.1_ChIP-seq | TGCTTTCTAGGAAA | TTTCCTAGAAAGCA |
| HOXC5_MA0132.1_SELEX\|PDX1_3 | AATTAG | CTAATT |
| PAX5_Poxn_SOLEXA_5_FBgn0003130_B1H | AGCGTGACG | CGTCACGCT |
| SOX18_1 | TTCAATTGTTCTAAAA | TTTTAGAACAATTGAA |
| ESRRA_disc2 | AGCCCAAGGTCAC | GTGACCTTGGGCT |
| YY1_disc1 | GCCGCCATCTTGGGTGC | TTGCCCGCACCCAAGAT |
| | GGGCAA | GGCGGC |
| HOXA13_1 | AAACCTCGTAAAATTT | AAATTTTACGAGGTTT |
| HOXC10_Hoxd9_1_SELEX\|HOXD9_1 | CCCATAAAA | TTTTATGGG |
| BARHL2_BARHL2_2_SELEX\|BARHL2_3 | AGCAATTAAC | GTTAATTGCT |
| NR2F2_Mv104_ChIP-seq\|NR2C2_disc2 | ACCTTTGACC | GGTCAAAGGT |
| DMRT2_pTH9261_PBM | AATTGATACA | TGTATCAATT |
| ATF1_ATF1_si_HocoMoco | CTGACGTCAC | GTGACGTCAG |
| DMRTC2_pTH9215_PBM\|DMRT1_pTH9197_PBM\|DMRTA | AATGTATCAA | TTGATACATT |
| 2_pTH9198_PBM | | |
| HNF1_4 | AGCAGTTAATAATTAAC | TATGGTTAATTATTAACT |
| | CATA | GCT |
| MEOX2_MEOX1_1_SELEX\|MEOX1_2 | GCTAATTAAC | GTTAATTAGC |
| NKX2-4_1\|NKX2-1_3 | AATTTCAAGTGGCTTA | TAAGCCACTTGAAATT |
| HOXC8_1 | ACGTTAATTACCCCAA | TTGGGGTAATTAACGT |
| CTCF_disc2 | ACCAGGGGGCG | CGCCCCCTGGT |
| GATA2_K562b_GATA1_UCD_ChIP-seq | GCAGATAAGGA | TCCTTATCTGC |
| HOMEZ_1 | AAAACATCGTTTTTAAG | CTTAAAAACGATGTTTT |
| AHR::ARNT_2 | GGGGATCGCGTGACAA | GGGTTGTCACGCGATCC |
| | CCC | CC |
| HOXC4_1 | CGAATTAATTAACAATA | TATTGTTAATTAATTCG |
| GMEB1_Gmeb1_1745_PBM\|GMEB1_pTH8318_PBM | TGACGTACA | TGTACGTCA |
| ETV5_GM12878_ETS1_HudsonAlpha_ChIP-seq | GAACTACAATTCCCAGA | GCCTTCTGGGAATTGTA |
| | AGGC | GTTC |
| POU3F3_PO3F1_f1_HocoMoco | CATTGTAATGCAAA | TTTGCATTACAATG |
| LHX1_LHX3_f1_HocoMoco | AAAATTAATTAAT | ATTAATTAATTTT |
| RXRA_known8 | AGGTCACGGAGAGGTC | TGACCTCTCCGTGACCT |
| | A | |
| OBOX1_1 | GTAGTTAATCCCCTTAA | TTAAGGGGATTAACTAC |
| NR3C1_known7 | CCACGAAGAACACCATG | GGGGTGGGGACATGGT |
| | TCCCCACCCC | GTTCTTCGTGG |
| KLF14_KLF13_1_SELEX\|KLF13_1 | ATGCCACGCCCCTTTTTG | CAAAAAGGGGCGTGGC |
| | | AT |
| NHLH2_HLH4C_da_SANGER_5_4_FBgn0011277_B1H\|TCF4 | CCACCTGAGCCC | GGGCTCAGGTGG |
| HLH4C_da_SANGER_5_4_FBgn0000413_B1H | | |
| NR3C1_known4 | AGAACACCCTGTACC | GGTACAGGGTGTTCT |
| MEIS1_MEIS3_1_SELEX\|ME153_2 | CCTGTCAA | TTGACAGG |
| PRDM16_V$EVI1_01_Transfac\|RUNX1_2 | AGATAAGATAAGATAA | TTATCTTATCTTATCT |
| FOXD1_FOXB1_1_SELEX\|FOXB1_1 | GAATGACACAGCGA | TCGCTGTGTCATTC |
| POU3F3_MA0254.1_DNasel | TATGCA | TGCATA |
| FOSL1_MA0476.1_ChIP-seq | AATGAGTCACA | TGTGACTCATT |
| E2F1_E2F1_3_SELEX | TTTTGGCGCCAAAA | TTTTGGCGCCAAAA |
| BARHL2_CG11085_Cell_FBgn0030408_B1H\|BSX_Bsh_Cell_ | CCAATTAAA | TTTAATTGG |
| FBgn0000529_B1H | | |
| ALX1_CG9876_Cell_FBgn0034821_B1H\|SHOX_Pph13_Cell | ACTAATTA | TAATTAGT |
| _FBgn0023489_B1H | | |
| FOXH1_MA0479.1_ChIP-seq | TCCAATCCACA | TGTGGATTGGA |
| GATA2_V$GATA6_01_Transfac\|GATA_known9 | AAAGATAAGC | GCTTATCTTT |
| DMRT2_1 | ACAATGTATCAATTTG | CAAATTGATACATTGT |
| DMRTC2_pTH9250_PBM\|DMRTA2_pTH9300_PBM | AATGTATC | GATACATT |
| YY2_V$YY1_02_Transfac\|YY1_known2 | AGCAGCCAAGATGGCC | CCGCGGCCATCTTGGCT |
| | GCGG | GCT |
| AC226150.2_pTH5972_PBM | CTTGTCAA | TTGACAAG |
| TBPL2_Mv129_ChIP-seq | TATGCAAATA | TATTTGCATA |
| NHLH2_NHLH1_2_SELEX\|NHLH2_NHLH1_1_SELEX\|NHLH1 | CGCAGCTGCG | CGCAGCTGCG |
| _4\|NHLH1_5 | | |
| PAX9_MA0014.2_ChIP-seq | GAGGGCAGCCAAGCGT | GTCACGCTTGGCTGCCC |
| | GAC | TC |
| ENSG00000250811_tgo_sim_SANGER_5_F Bgn0004666_61 | GGTCACGTAC | GTACGTGACC |
| H\|ARNT2_tgo_trh_SANGER_5_FBgn0015014_B1H\|ARNT2 | | |
| _tgo_sim_SANGER_5_FBgn0015014_B1H | | |
| ETS_known1 | AAAACAGGAAGTACGT | ACGTACTTCCTGTTTT |
| NR2E3_pTH5877_PBM | GAGATCAA | TTGATCTC |
| HNF4_known5\|PPARA_4\|HNF4_known6\|HNF4_known7 | GGGTCAAAGGTCA | TGACCTTTGACCC |
| FOXL1_3 | ACCTTTGTTTACATTTA | TAAATGTAAACAAAGGT |
| HINFP_H\|NFP1_2_SELEX\|HINFP_3 | GCGGACGTTGCAACGTC | GCGGACGTTGCAACGTC |
| | CGC | CGC |
| CCNT2_disc1 | CTGGGGGGGGCAGATA | TGCCTTATCTGCCCCCCC |
| | AGGCA | CAG |
| SP9_CG5669_SOLEXA_5_FBgn0039169_B1H | AGTGGGCGGGGCCAA | TTGGCCCCGCCCACT |
| NFYA_MA0313.1_COMPILED | ACCAA | TTGGT |
| TEF_HLF_1_SELEX\|HLF_3 | CATTACGTAACC | GGTTACGTAATG |
| SIX6_Six3_1732_PBM | GTATCAC | GTGATAC |
| TEF_DBP_1_SELEX\|DBP_2 | CATTACGTAACA | TGTTACGTAATG |
| SPI1_disc2\|BCL_disc4\|PAX5_disc3\|RXRA_disc4 | GGAAGTGAAA | TTTCACTTCC |
| PAX5_pTH8981_PBM | ACCGTGACCAC | GTGGTCACGGT |
| E2F_known19 | GCCCGTTTCGCGCCAA | TTGGCGCGAAACGGGC |
| CTCFL_disc1 | CAGGGGGCGC | GCGCCCCCTG |
| MEF2B_MEF2A_f1_HocoMoco | GCTATAAATAGAAC | GTTCTATTTATAGC |
| POU2F2_known13 | TACTGATTATGCATATTT | TTAAAAATATGCATAAT |
| | TAA | CAGTA |
| ZNF35_Zfp105_2634_PBM | CAATAAACAA | TTGTTTATTG |
| POU3F3_V$TST1_01_Transfac\|CCDC6_1 | GAGGAATTAAAATAC | GTATTTTAATTCCTC |
| ARID5A_pTH5121_PBM | GCAATATCGA | TCGATATTGC |
| MAFK_pTH5098_PBM | AATTGCTGAC | GTCAGCAATT |
| NFKB2_NFKB2_1_SELEX\|NFKB1_NFKB1_1_SELEX\|NFKB_kn | AGGGGAATCCCCT | AGGGGATTCCCCT |
| own10\|NFKB_known11 | | |
| TLX3_Tlx2_3498_PBM\|DBX2_pTH6051_PBM\|LHX1_Lim3_ | ATTAATTA | TAATTAAT |
| Cell_FBgn0002023_B1H\|DBX2_Dbx1_3486_PBM\|EN2_en_ | | |
| FlyReg_FBgn0000577_B1H | | |
| NPAS2_CLOCK_1_SELEX\|CLOCK_1 | AACACGTGTT | AACACGTGTT |
| ATF1_V$TAXCREB_02_Transfac\|ATF3_known5 | ATGACGCATACCCCC | GGGGGTATGCGTCAT |
| JUN_kay_Jra_SANGER_5_FBgn0001291_B1H\|JUN_MA049 | GATGAGTCACC | GGTGACTCATC |
| 1.1_ChIP-seq | | |
| E2F4_K562b_E2F4_UCD_ChIP-seq | GGCGGGAAATTGGAA | TTCCAATTTCCCGCC |
| BARHL2_BARHL2_4_SELEX\|BARHL2_Barhl1_1_SELEX\|BAR | ACCGTTTAGC | GCTAAACGGT |
| HL2_5\|BARHL1_2 | | |
| DMRTC2_1 | CAACAATGTAACAA | TTGTTACATTGTTG |
| RARG_RARA_3_SELEX\|RARA_4 | AGGTCATGCAAAGGTCA | TGACCTTTGCATGACCT |
| FOXA_known2 | AAAAACAAACA | TGTTTGTTTTT |
| NFIL3_MA0025.1_SELEX | ACGTTACATAA | TTATGTAACGT |
| POU3F3_V$OCT1_06_Transfac\|POU2F2_known6 | CAAAATGACATGCA | TGCATGTCATTTTG |
| TFCP2_3 | CCAGCTCAAACCAGC | GCTGGTTTGAGCTGG |
| GCM1_1 | AATGATGCGGGTACGA | TCGTACCCGCATCATT |
| HNF4_disc4 | AGCAAACAG | CTGTTTGCT |
| ARNT2_tgo_tai_SANGER_5_FBgn0015014_B1H\|BHLHE40_ | GCACGTGAC | GTCACGTGC |
| BHE40_f2_HocoMoco | | |
| STAT3_MCF10A-Er-Src_STAT3_Harvard#Weissman_ChIP- | CACTTCCGGGAAATG | CATTTCCCGGAAGTG |
| seq\|STAT3_MCF10A-Er-Src_STAT3_Stanford_ChIP-seq | | |
| TBX3_TBX3_f1_HocoMoco | AGGTAGAGAATTAGGT | TTTTTATCACCTAATTCT |
| | GATAAAAA | CTACCT |
| SREBF2_V$SREBP1_02_Transfac | GTGGGGTGATA | TATCACCCCAC |
| HOXC10_Hoxd11_3873_PBM\|HOXC10_Hoxd10_2368_PB | GTCATAAA | TTTATGAC |
| M | | |
| CR936877.3_Rxra_1035_PBM | AGGGGTCACG | CGTGACCCCT |
| EOMES_Eomes_0921_PBM\|EOMES_TBR1_1_SELEX\|TBR1_ | AGGTGTGAAA | TTTCACACCT |
| 1 | | |
| PAX9_PAX8_f1_HocoMoco | CCCGCTTCAGTGAC | GTCACTGAAGCGGG |
| CTCF_disc8 | CCACAGGCAGGTGC | GCACCTGCCTGTGG |
| ESR2_ESR2_si_HocoMoco | AGGTCAC | GTGACCT |
| POU3F3_POU3F2_2_SELEX\|POU3F3_POU3F1_1_SELEX\|PO | TAATTTGCATAA | TTATGCAAATTA |
| U3F1_2\|POU3F2_6 | | |
| CEBPA_pTH5253_PBM | TTGCGAAA | TTTCGCAA |
| TEAD3_TEAD3_1_SELEX\|TEAD3_1 | ACATTCCTCGCATTCCA | TGGAATGCGAGGAATG |
| | | T |
| HOXC5_Antp_Cell_FBgn0000095_B1H\|EMX2_Ems_Cell_FB | TCATTAAA | TTTAATGA |
| gn0000576_B1H\|HOXG_Antp_SOLEXA_FBgn0000095_B1 | | |
| H\|HOXC5_Ubx_SOLEXA_FBgn0003944_B1H | | |
| SMC3_disc2 | ACCAGCAGG | CCTGCTGGT |
| SOX11_SOX4_f1_HocoMoco | CGCTTTGTTCTC | GAGAACAAAGCG |
| RARG_RARA_1_SELEX\|RARA_2 | AAAGGTCATTTGAGGTC | TGACCTCAAATGACCTT |
| | A | T |
| GATA2_MA0482.1_ChIP-seq | GGGAGATAAGA | TCTTATCTCCC |
| MYOD1_MYOG_f1_HocoMoco | GCAGCAGCTGTCA | TGACAGCTGCTGC |
| FOXO1_2 | AATGTAAACAACAC | GTGTTGTTTACATT |
| NFAT_2 | AATTTTCCAC | GTGGAAAATT |
| ZNF143_disc3 | ACTACAACTCCCAGCAG | GCCTGCTGGGAGTTGTA |
| | GC | GT |
| AR_MCR_f1_HocoMoco | AAGAACAGGTTGTTGTA | TACAACAACCTGTTCTT |
| TEF_Hlf_1_SELEX\|HLF_4 | GATTACGTAACC | GGTTACGTAATC |
| EVX2_pTH6287_PBM | ACTAATTACC | GGTAATTAGT |
| MZF1_MA0056.1_SELEX\|MZF1_3 | TCCCCA | TGGGGA |
| RFX8_RFX1_f1_HocoMoco | GTTGCCAGGGAA | TTCCCTGGCAAC |
| ZNF143_ZNF143_1_SELEX\|ZNF143_known2 | CAATGCATTGTGGGTA | TACCCACAATGCATTG |
| AP1_disc2 | GCCAATCAGA | TCTGATTGGC |
| BHLHA15_dimm_da_SANGER_5_FBgn0023091_B1H\|TCF4 | ACCATATGGCG | CGCCATATGGT |
| _dimm_da_SANGER_5_FBgn0000413_B1H | | |
| NR3C1_known3 | AGAACATCATGTACT | AGTACATGATGTTCT |
| GATA_known12 | GGATA | TATCC |
| FOXD1_V$ FOXD3_01_Transfac\|FOXD3_1 | AAACAAACAATC | GATTGTTTGTTT |
| EGR1_known7 | AATGCGGGGGCGGA | TCCGCCCCCGCATT |
| CR936877.3_RXRA_f1_HocoMoco\|PPARA_PPARA_f2_Hoc | AGGTCAAAGGTCA | TGACCTTTGACCT |
| oMoco\|NR2C2_NR2C2_a_HocoMoco | | |
| FOXO6_FOXO3_3_SELEX\|FOXO3_6 | GTGTGGGGAAA | TTTCCCCACAC |
| ENSG00000187728_Tcf21_1_SELEX\|TCF21_1 | ACAACAGCTGTTGC | GCAACAGCTGTTGT |
| REST_known3 | GCGCTGTCCGTGGTGCT | TCAGCACCACGGACAGC |
| | GA | GC |
| RARG_Rara_3_SELEX\|RARA_10 | AAGGTCAAAAGGTCA | TGACCTTTTGACCTT |
| BHLHE40_Bhlhb2_1_SELEX\|MITF_pTH2885_PBM\|BHLHE4 | GTCACGTGAC | GTCACGTGAC |
| 0_BHLHE41_1_SELEX\|ARNT2_ARNTL_LSELEX\|MYC_disc1 | | |
| \|ATF3_disc1\|NFE2_disc2\|SIRT6_disc1\|ARNTL_1\|BHLHE41 | | |
| _2\|BHLHE40_known4 | | |
| HOXA3_3 | ACTAATTACCTCAA | TTGAGGTAATTAGT |
| LMX1A_Lmx1a_2238_PBM\|LMX1A_LMX1B_1_SELEX\|LMX | TTAATTAA | TTAATTAA |
| 1A_LMX1A_1_SELEX\|LHX1_Lhx4_1_SELEX\|HOXA1_pTH54 | | |
| 86_PBM\|SHOX_Uncx4_PBM\|HOXB2_pTH5491_PBM\|LMX | | |
| 1A_2\|LMX16_2\|LHX4_2 | | |
| SOX1_SOX2_f1_HocoMoco | ATTTGCATAACAATGG | CCATTGTTATGCAAAT |
| IRF5_IRF5_f1_HocoMoco | TAAAGGAAAGCCAAAA | TCACTTTTGGCTTTCCTT |
| | GTGA | TA |
| IRF_known12 | ATAAACCGAAACCAA | TTGGTTTCGGTTTAT |
| SRF_H1-hESC_SRF_HudsonAlpha_ChIP-seq | CCATATAAGGCAAA | TTTGCCTTATATGG |
| ATF3_known11 | ATGACG | CGTCAT |
| MYOG_1 | CAGCTGCC | GGCAGCTG |
| LHX8_pTH6556_PBM | GTAATCAA | TTGATTAC |
| FOXO6_foxo_SANGER_10_FBgn0038197_B1H | TCGTAAACA | TGTTTACGA |
| PRRX2_1 | AGGTTAATTGGTTAAA | TTTAACCAATTAACCT |
| SOX3_1 | AAACAATGACATTGTTT | AAACAATGTCATTGTTT |
| CTCF_GM12878_CTCF_Broad_ChIP-seq | GCCCCCTGGTGGCCA | TGGCCACCAGGGGGC |
| IRX3_2 | AATATACATGTAATATT | AATATTACATGTATATT |
| SIX5_disc3 | AAACTACATTTCCCA | TGGGAAATGTAGTTT |
| NFIA_NFIB_1_SELEX\|NFIB_1 | CTGGCACTGTGCCAA | TTGGCACAGTGCCAG |
| HOXC9_I$ABDB_01_Transfac | GCGTTTATGGCGAC | GTCGCCATAAACGC |
| TFAP2_disc2 | CATGCCCTGGGGCCA | TGGCCCCAGGGCATG |
| IRF2_IRF2_f1_HocoMoco | GGAAAGTGAAAGCA | TGCTTTCACTTTCC |
| STAT4_MA0518.1_ChIP-seq | CCATTTCCTGGAAA | TTTCCAGGAAATGG |
| HOXC10_HOXC10_3_SELEX\|HOXC10_4 | ATTTTACGAC | GTCGTAAAAT |
| PBX3_known1 | CTACCATCAATC | GATTGATGGTAG |
| POU2F2_disc2 | CCCCCTCACCTGC | GCAGGTGAGGGGG |
| CTCF_HMF_CTCF_UW_ChIP-seq | CCACCAGAGGG | CCCTCTGGTGG |
| ZNF143_V$STAF_02_Transfac | ATTTCCCATCATGCCTTG | TCGCAAGGCATGATGG |
| | CGA | GAAAT |
| TCF3_5 | CACCTGCC | GGCAGGTG |
| RARG_RARA_2_SELEX\|RARA_3 | CATTGACCTTTTGACCTC | GAGGTCAAAAGGTCAA |
| | | TG |
| NFIA_NFIX_3_SELEX | AGTGCCAAT | ATTGGCACT |
| NFIA_NFIX_2_SELEX | CGTGCCAAG | CTTGGCACG |
| SIN3A_disc1 | TCAGCACCACGGACA | TGTCCGTGGTGCTGA |
| ZSCAN16_ZNF435_1_SELEX\|ZSCAN16_1 | AGGTGTTCTGTTAACAC | AGTGTTAACAGAACACC |
| | T | T |
| EP300_disc7 | ATGACACA | TGTGTCAT |
| ZNF652_Zfp652_1_SELEX\|ZNF652_1 | AGAAAGGGTTAAT | ATTAACCCTTTCT |
| ARID3C_retn_SANGER_5_FBgn0004795_B1H | AATCAAAA | TTTTGATT |
| HOXD11_1 | AGGATTTTACGACCTTA | TAAGGTCGTAAAATCCT |
| AR_MA0007.2_ChIP-seq | AAGAACAGAATGTTC | GAACATTCTGTTCTT |
| ZBTB7B_ZBT7B_si_HocoMoco | CGGAGAGGGGGAGGG | GCCCCCCCCCTCCCCCTC |
| | GGGGGGC | TCCG |
| TCF7L2_known3 | AACATCAAAGG | CCTTTGATGTT |
| HOXB3_1 | TCCAACTAATTAGCTCA | TGAGCTAATTAGTTGGA |
| POU1F1_PIT1_f1_HocoMoco | ATATATTCATGAG | CTCATGAATATAT |
| PAX6_PAX6_1_SELEX\|PAX6_5 | TGTGCAGTCATGCGTGA | TTTCACGCATGACTGCA |
| | AA | CA |
| TFDP1_TFDP1_f1_HocoMoco | AAATGGCGGGAAAC | GTTTCCCGCCATTT |
| NKX2-5_Nkx2-4_3074_PBM\|NKX2- | AACCACTTAA | TTAAGTGGTT |
| 5_V$NKX22_01_Transfac\|NKX3-1_Nkx3- | | |
| 1_2923_PBM\|NKX2-5_Nkx2-6_3437_PBM\|NKX2-2_1 | | |
| HEY1_HEY2_f1_HocoMoco | GGGGGCACGTGGCATT | TAATGCCACGTGCCCCC |
| | A | |
| E2F7_E2F7_1_SELEX\|E2F7_1 | TTTTCCCGCCAAAA | TTTTGGCGGGAAAA |
| IKZF2_3 | ATAAGGAAAAA | TTTTTCCTTAT |
| TCF7L1_TF7L2_f1_HocoMoco | AAGATCAAAGGG | CCCTTTGATCTT |
| STAT1_Mv125_ChIP-seq | AAACGAAACT | AGTTTCGTTT |
| GCM1_GCM1_1_SELEX\|GCM1_2 | CATGCGGGTA | TACCCGCATG |
| SOX17_3 | ATAAACAATTAATCA | TGATTAATTGTTTAT |
| ONECUT3_ONEC2_si_HocoMoco | AAAAAAAATCAATAACA | GTCTTGTTATTGATTTTT |
| | AGAC | TTT |
| NR2C2_Hr78_SANGER_5_FBgn0015239_B1H\|CR936877.3_ | AGAGGTCA | TGACCTCT |
| H1-hESC_RXRA_HudsonAlpha_ChIP-seq | | |
| HNF1A_1 | GGTTAATAATTAAC | GTTAATTATTAACC |
| NFE2_MA0150.2_ChIP-seq | CAGCATGACTCAGCA | TGCTGAGTCATGCTG |
| HMGA1_1 | AATTTCC | GGAAATT |
| T_V$BRACH_01_Transfac\|T_1 | AATTTCACACCTAGGTG | CTAGTCACACCTAGGTG |
| | TGACTAG | TGAAATT |
| FOXD1_pTH8896_PBM\|FOXD1_YCR065W_570_DeBoer11\| | ATAAACAA | TTGTTTAT |
| FOXD1_MA0317.1_PBM,\|FOXD3_pTH9057_PBM | | |
| SIX5_known 2 | AAAAATGATACCCCATC | GATGGGGTATCATTTTT |
| EN2_MA0229.1_B1H\|EN2_Inv_Cell_FBgn0001269_B1H | TAATTAGA | TCTAATTA |
| RUNX2_2 | AAACCACA | TGTGGTTT |
| MEOX2_Btn_Cell_FBgn0014949_B1H\|HOXC5_Dfd_SOLEXA | CTTAATGA | TCATTAAG |
| _FBgn0000439_B1H\|HOXC5_Zen_SOLEXA_F Bgn0004053_ | | |
| B1H\|HOXC5_Dfd_Cell_FBgn0000439_B1H | | |
| MEF2_known9 | ATGCTAAAAATAGATTG | CAATCTATTTTTAGCAT |
| SP100_1 | ATTTTACGGAAAAT | ATTTTCCGTAAAAT |
| NKX2-5_NKX22_si_HocoMoco | AAACCACTTAAA | TTTAAGTGGTTT |
| MZF1_V$MZF1_01_Transfac\|MZF1_1 | AGTGGGGA | TCCCCACT |
| TLX3_V$NCX_01_Transfac\|TLX2_1 | CCAATTACCG | CGGTAATTGG |
| GATA2_GATA4 _a_HocoMoco | ACAGATAAC | GTTATCTGT |
| CDX2_1 | AAAGTTTTATTGCC | GGCAATAAAACTTT |
| AR_AR_1_SELEX\|NR3C1_known15 | AGGTACACGGTGTACCC | GGGTACACCGTGTACCT |
| ZEB1_MA0103.2_ChIP-seq | CAGGTGAGG | CCTCACCTG |
| NKX3-1_NKX31_si_HocoMoco | AATAAGTATATAA | TTATATACTTATT |
| HOXC12_1 | GAAATTTTACGACCTAA | TTAGGTCGTAAAATTTC |
| SP9_SP3_1_SELEX\|KLF14_KLF16_1_SELEX\|KLF16_1\|SP1_k | GCCACGCCCCC | GGGGGCGTGGC |
| nown9 | | |
| RFX8_RFX2_2_SELEX\|RFX8_RFX4_2_SELEX\|RFX8_Rfx2_2_S | CGTTGCCTAGCAACG | CGTTGCTAGGCAACG |
| ELEX\|RFX2_2\|RFX5_known7\|RFX2_4 | | |
| GRHL1_GRHL1_1_SELEX\|GRHL1_1 | AACCGGTTAAACCGGTT | AACCGGTTTAACCGGTT |
| BARX1_pTH6449_PBM\|BARX1_Barx2_3447_PBM\|HMX1_ | AGCAATTAA | TTAATTGCT |
| Hmx3_3490_PBM | | |
| PKNOX2_hth_SOLEXA_2_FBgn0001235_B1H | CTGTCAAA | TTTGACAG |
| CDX2_CDX2_1_SELEX\|CDX2_CDX1_1_SELEX\|CDX1_2\|CDX | GCAATAAAA | TTTTATTGC |
| 2_3 | | |
| PRDM16_V$EVI1_06_Transfac\|RUNX1_1 | ACAAGATAA | TTATCTTGT |
| ZIC4_ZIC3_1_SELEX\|ZIC3_3 | GACCCCCCGCTGCGC | GCGCAGCGGGGGGTC |
| NFY_known3 | ATCAGCCAATCAGAGC | GCTCTGATTGGCTGAT |
| BX088580.2_SRP000712_Oct4_ChIP- | ATTTGCATAACAATG | CATTGTTATGCAAAT |
| seq\|POU5F1_disc1\|POU5F1_known2 | | |
| ESR2_ESR1_1_SELEX\|ESRRA_known6 | AAGGTCACGGTGACCTG | CAGGTCACCGTGACCTT |
| SOX2_SOX21_2_SELEX\|SOX9_SOX8_1_SELEX\|SOX9_SOX9_ | AACAATGTGCAGTGTT | AACACTGCACATTGTT |
| 2_SELEX\|SOX21_3\|SOX8_2\|SOX9_4 | | |
| PTF1A_Fer2_da_SANGER_5_FBgn0038402_B1H\|TCF4_Fer | CCAGCTGACG | CGTCAGCTGG |
| 2_da_SANGER_5_F Bgn0000413_B1H | | |
| RORB_RORA_1_SELEX\|RORA_6 | CAAAGGTCAAATTGAG | TGACCTCAATTTGACCTT |
| | GTCA | TG |
| YY2_GM12892_YY1_HudsonAlpha_ChIP-seq | AAGATGGCGGCCGCC | GGCGGCCGCCATCTT |
| SPIC_Sfpi1_1034_PBM\|SP11_disc1 | AAGAGGAAGT | ACTTCCTCTT |
| ARID3C_MA0151.1_SELEX\|ARID3A_1 | ATTAAA | TTTAAT |
| NOBOX_Og2x_3719_PBM | GCCAATTAA | TTAATTGGC |
| ELF1_disc2 | CGCTTCCGGC | GCCGGAAGCG |
| PKNOX1_1 | AAAGACCTGTCAATCC | GGATTGACAGGTCTTT |
| NHLH2_pTH3037_PBM | CACAGCTGCG | CGCAGCTGTG |
| NR2C2_disc3 | ACCCCGGA | TCCGGGGT |
| HOXB8_1 | ACCGGCAATTAATAAA | TTTATTAATTGCCGGT |
| NR2C2_NR2C2_1_SELEX\|NR2F2_NR2F6_2_SELEX\|NR2F2_ | GAGGTCAAAGGTCA | TGACCTTTGACCTC |
| NR2F6_3_SELEX\|NR2F2_Nr2f6_2_SELEX\|NR2C2_known1\| | | |
| NR2F6_2\|NR2F6_3\|NR2F6_5 | | |
| TBX1_TBX1_4_SELEX | TCTCACACCTCTGAGGT | TTTCACACCTCAGAGGT |
| | GTGAAA | GTGAGA |
| TBPL2_V$TATA_01_Transfac\|TATA_known2\|TATA_known | CCCCGCCTTTTATAC | GTATAAAAGGCGGGG |
| 5 | | |
| NR2C2_Mv97_ChIP-seq | AAGTGCTTCCGGGTC | GACCCGGAAGCACTT |
| SOX11_SOX4_1_SELEX\|SOX4_2 | AACACTGCAATTGTTC | GAACAATTGCAGTGTT |
| TFAP2A_AP2D_a_HocoMoco | ACGCGCCTCGGGCG | CGCCCGAGGCGCGT |
| SOX9_SOX10_1_SELEX\|SOX9_SOX8_6_SELEX\|SOX10_3\|SO | AACAATTGCAGTGTT | AACACTGCAATTGTT |
| X8_7 | | |
| ZIC4_MA0118.1_SELEX | GACCCCCCA | TGGGGGGTC |
| MAFK_HepG2_MAFK_Stanford_ChIP-seq | TGCTGACTCAGCA | TGCTGAGTCAGCA |
| BRCA1_BRCA1_f1_HocoMoco | CAACCCAAA | TTTGGGTTG |
| MGA_MGA_2_SELEX\|MGA_2 | AGGTGTGAAGTCACACC | AGGTGTGACTTCACACC |
| | T | T |
| LHX9_1 | CCCATTAATTAATCACC | GGTGATTAATTAATGGG |
| SOX13_SOX5_a_HocoMoco | TAACAATA | TATTGTTA |
| LMX1A_CG4328_Cell_FBgn0036274_B1H | ATTTATTG | CAATAAAT |
| FOXD1_V$FREAC3_01_Transfac\|FOXC1_1 | GGTAAGTAAATAAACA | TGTTTATTTACTTACC |
| SOX1_Sox1_3_SELEX\|SOX2_SOX21_3_SELEX\|SOX1_SOX14 | TCAATAACATTGA | TCAATGTTATTGA |
| _3_SELEX\|SRY_SRY_3_SELEX\|SOX14_4\|SOX21_4\|SRY_7\|S | | |
| OX1_4 | | |
| STAT3_V$STAT3_01_Transfac\|STAT3_V$STAT3_01_Transf | AATCATTTCCGGGAAAT | TGGCATTTCCCGGAAAT |
| ac\|STAT_known3 | GCCA | GATT |
| TFAP2_known9 | ATTCCCTGAGGGGAA | TTCCCCTCAGGGAAT |
| HOXC10_Hoxc10_2_SELEX\|HOXC10_HOXC10_2_SELEX\|HO | GTAATAAAAA | TTTTTATTAC |
| XC10_3\|HOXC10_6 | | |
| KLF4_KLF4_f2_HocoMoco | GCCCCGCCCA | TGGGCGGGGC |
| T_3 | TCACACCTAGGTGTGA | TCACACCTAGGTGTGA |
| EBF1_EBF1_1_SELEX\|EBF1_known4 | ATTCCCAAGGGAAT | ATTCCCTTGGGAAT |
| STAT1_HeLa-S3_STAT1_Stanford_ChIP-seq | ATGGGATTTCCGGGAAA | CCCATTTCCCGGAAATC |
| | TGGG | CCAT |
| HOXD1_1 | TAAACTAATTAGCTGTA | TACAGCTAATTAGTTTA |
| BARX1_1 | AAAGTAATTAGTGAAT | ATTCACTAATTACTTT |
| ZBTB33_disc2 | CTCGCGGGACC | GGTCCCGCGAG |
| GATA2_GATA6_f2_HocoMoco | AAGATAA | TTATCTT |
| MEF2B_Mf26_ChIP-seq | CTAAAAATAA | TTATTTTTAG |
| HESX1_HESX1_2_SELEX\|HESX1_2 | CTAATTGGCAATTAA | TTAATTGCCAATTAG |
| DLX5_1 | CAGAGCTAATTACCCC | GGGGTAATTAGCTCTG |
| ELF1_Eip74EF_FlyReg_FBgn0000567_B1H\|EP300_disc10 | AACAGGAAGT | ACTTCCTGTT |
| PKNOX2_PKNX1_si_HocoMoco | AGCTTGATTGATG | CATCAATCAAGCT |
| MEF2B_MEF2D_1_SELEX\|MEF2D_1 | ACTATAAATAGA | TCTATTTATAGT |
| JUN_pTH4337_PBM | ATGACGCAA | TTGCGTCAT |
| DLX1_DLX6_1_SELEX\|DLX1_DLX4_1_SELEX\|DLX1_DLX2_1_ | CCAATTAC | GTAATTGG |
| SELEX\|DLX1_DLX3_1_SELEX\|DLX1_Dlx1_1_SELEX\|DLX2_2\| | | |
| DLX3_2\|DLX4_2\|DLX6_1\|DLX1_3 | | |
| MEOX1_1 | CTGAGGTAATTACCTC | GAGGTAATTACCTCAG |
| POU1F1_pTH3818_PBM | ATAATTAATA | TATTAATTAT |
| ELF3_ELF3_f1_HocoMoco | ATTTCCTGTTTGCC | GGCAAACAGGAAAT |
| SPDEF_SPDEF_6_SELEX\|SPDEF_7 | GCAGAAAGAAGTAACA | TGTTACTTCTTTCTGC |
| EP300_disc6 | ATTACATCA | TGATGTAAT |
| POU2F2_disc1 | ATGCAAAT | ATTTGCAT |
| FOXD1_FOXI1_2_SELEX\|FOXI1_4 | ATGTTTACGGTAAACAA | TTGTTTACCGTAAACAT |
| ZBTB3_Zbtb3_1048_PBM | AATGCAGTG | CACTGCATT |
| FOXD1_FOXD2_1_SELEX\|FOXD2_1 | AAAAAATATTTACT | AGTAAATATTTTTT |
| PPARA_MA0066.1_SELEX\|RXRA_known5 | AGTAGGTCACCGTGACC | GTAGGTCACGGTGACCT |
| | TAC | ACT |
| HOXC13_1 | AAAGCTCGTAAAATTT | AAATTTTACGAGCTTT |
| ALX1_pTH6636_PBM | ATTGTACAAT | ATTGTACAAT |
| CDX2_Cdx2_4272_PBM | GGCAATAAA | TTTATTGCC |
| GMEB2_pTH9219_PBM | CTTACGTCA | TGACGTAAG |
| NFE2L1_NF2L1_f1_HocoMoco | AATGACT | AGTCATT |
| ESRRG_SRP000217_Esrrb_ChIP-seq | AGGTCAAGGTCACCC | GGGTGACCTTGACCT |
| C13orf38-SOHLH2_pTH5058_PBM | AGCCCGTGCG | CGCACGGGCT |
| GATA_known14 | CTGGTGGGGACAGATA | CTTATCTGTCCCCACCAG |
| | AG | |
| ATOH7_cato_da_SANGER_10_FBgn0024249_B1H\|TCF4_ca | CACAGCTGAC | GTCAGCTGTG |
| to_da_SANGER_10_FBgn0000413_B1H | | |
| MYC_known8 | CGCGCGTGGC | GCCACGCGCG |
| MLL_pTH7031_PBM | GGGGGCGTAA | TTACGCCCCC |
| HOXC5_Scr_Cell_FBgn0003339_B1H | CGTTAATGA | TCATTAACG |
| E2F_known7 | CCGCCAAA | TTTGGCGG |
| SOX18_SOX18_2_SELEX\|SOX18_3 | ATCAATGCAATTGAT | ATCAATTGCATTGAT |
| MAFBA_SANGER_5_FBgn0000964_B1H | GCTGAGTCAGCA | TGCTGACTCAGC |
| HSF_known3 | ATTCTAGAAATTTCTCC | GGAGAAATTTCTAGAAT |
| JUN_HUVEC_CJUN_Stanford_ChIP-seq | AAAGGGATGACTCAT | ATGAGTCATCCCTTT |
| AP1_disc5 | ACTCACCAC | GTGGTGAGT |
| CXXC1_pTH7032_PBM | CCGCTAA | TTAGCGG |
| MYOD1_2 | ACCACCTGTC | GACAGGTGGT |
| HNF4G_HNF4G_f1_HocoMoco | GGCCAAAGTCCA | TGGACTTTGGCC |
| KDM2B_pTH9191_PBM | GCGTAAATA | TATTTACGC |
| SOX12_1 | GTTTAGAACAATTA | TAATTGTTCTAAAC |
| MYOD1_HLH1_PBM | CAGCTGTC | GACAGCTG |
| BRCA1_disc1\|ZBTB33_disc1\|ETS_disc3\|CHD2_disc1\|NR3C | TCTCGCGAGA | TCTCGCGAGA |
| 1_disc3 | | |
| MAZ_1 | CCCTCCCC | GGGGAGGG |
| RARG_Rarg_2_SELEX\|RARG_8 | AAGGTCATCTAAAGGTC | TGACCTTTAGATGACCT |
| | A | T |
| ETS_disc1 | AACTACAACTCCCA | TGGGAGTTGTAGTT |
| TFAP2A_AP2A_U_HocoMoco | GCCTCAGGC | GCCTGAGGC |
| ZBTB16_1 | GAACAGATCAAACTTTA | TTGTATTGAAGCTAAAG |
| | GCTTCAATACAA | TTTGATCTGTTC |
| EGR3_sr_SOLEXA_5_FBgn0003499_B1H\|EGR3_sr_SANGER | CCCCGCCCACGCAC | GTGCGTGGGCGGGG |
| _5_FBgn0003499_B1H | | |
| HNF4_known10 | AGTTCA | TGAACT |
| GLIS2_1 | CTGTGGGGGGTCGATA | TATCGACCCCCCACAG |
| CTCF_AG09309_CTCF_UW_ChIP-seq | CACCAGGGGGCGCCAG | CTGGCGCCCCCTGGTG |
| EN2_EN1_4_SELEX\|EN1_7 | TAATTAAGCAATTA | TAATTGCTTAATTA |
| SMARCC1_HeLa-S3_BAF170_Stanford_ChIP-seq | GCCTGCTGGGAGTTGTA | GGACTACAACTCCCAGC |
| | GTCC | AGGC |
| NFE2_V$NFE2_01_Transfac\|MAF_known2\|NFE2L2_3 | ATGACTCAGCA | TGCTGAGTCAT |
| FOXD1_V$FREAC7_01_Transfac\|FOXL1_1 | ATCTTGTTTATGTATA | TATACATAAACAAGAT |
| MEF2B_V$MEF2_02_Transfac\|MEF2_known3 | AGGTGCTATTTTTAGCA | TCCGGTGCTAAAAATAG |
| | CCGGA | CACCT |
| MAFB_Mafb_2_SELEX\|MAF_known11 | AATGCTGACTCAGCACA | TGTGCTGAGTCAGCATT |
| STAT3_STAT3_si_HocoMoco\|STAT3_SRP000217_Stat3_ChI | CTTCCAGGAAG | CTTCCTGGAAG |
| P-seq | | |
| TEF_HLF_si_HocoMoco | CTGTTACGTAATC | GATTACGTAACAG |
| HSFY1_HSFY2_1_SELEX\|HSFY2_1 | TTCGAAACGTTCGAA | TTCGAACGTTTCGAA |
| SOX15_SOX15_1_SELEX\|SOX1_Sox1_1_SELEX\|SRY_SRY_1_ | AACAATAACATTGTT | AACAATGTTATTGTT |
| SELEX\|SOX15_2\|SRY_5\|SOX1_2 | | |
| NKX3-1_Nkx3-1_2923_PBM | AGCCACTTAA | TTAAGTGGCT |
| ZBTB4_ZBTB4_si_HocoMoco | CCCACCTGCCATCTAGG | CCTAGATGGCAGGTGG |
| | | G |
| ZBTB6_V$Z1D_01_Transfac\|ZBTB6_1 | CGGCTCTATCATC | GATGATAGAGCCG |
| POU3F3_POU3F3_3_SELEX | ATGAATATTCAT | ATGAATATTCAT |
| GLI1_GL12_1_SELEX\|GL12_1 | CGTCGTGGGTGGTC | GACCACCCACGACG |
| NR3C1_known6 | CGCACAAGAACACAATG | CGGGAGGGTACATTGT |
| | TACCCTCCCG | GTTCTTGTGCG |
| NKX2-3_1 | CATTAAGTACTTAAAG | CTTTAAGTACTTAATG |
| NOBOX_pTH6448_PBM | CTTAATTGGC | GCCAATTAAG |
| AP1_disc4 | AGTCATACTGAAA | TTTCAGTATGACT |
| POU3F3_4 | ATGAATATTCAA | TTGAATATTCAT |
| ELF1_Eip74EF_SANGER_5_FBgn0000567_B1H\|ELF3_Elf3_3 | ACCCGGAAGT | ACTTCCGGGT |
| 876_PBM\|ELF3_Elf5_PBM\|ELF3_Ehf_3056_PBM\|ELF1_Mv | | |
| 63_ChIP-seq\|ELF3_Ehf_PBM\|ELF1_disc1 | | |
| NFE2L2_2 | CATGACTCAGCAG | CTGCTGAGTCATG |
| RORB_Hr46_FlyReg_FBgn0000448_B1H | AATTGGGTCA | TGACCCAATT |
| NR1H_3 | GGGGTCAGTAGAGGTC | TGACCTCTACTGACCCC |
| | A | |
| SOX18_Sox18_3506_PBM\|SOX9_Sox8_1733_PBM\|SOX1_S | AAAACAAT | ATTGTTTT |
| ox14_2677_PBM\|SOX3_pTH3087_PBM\|SOX7_Sox7_3460 | | |
| PBM | | |
| STAT_known7 | CATTTCCG | CGGAAATG |
| IRX3_MA0233.1_B1H | AAACA | TGTTT |
| PAX5_disc1 | GGGGGCAGCCAAGCGT | GTCACGCTTGGCTGCCC |
| | GAC | CC |
| FOXD1_FOXA3_f1_HocoMoco | GCAAAGCAAACAA | TTGTTTGCTTTGC |
| HNF4G_Hnf4a_1_SELEX\|HNF4G_HNF4A_5_SELEX\|HNF4_k | ATTGGACTTTGACCCC | GGGGTCAAAGTCCAAT |
| nown20\|HNF4_known22 | | |
| ZNF263_pTH2682_PBM | GGGAGCAC | GTGCTCCC |
| HES7_HE57_1_SELEX\|HES7_1 | TGGCACGTGCCA | TGGCACGTGCCA |
| RARG_Rarb_3_SELEX\|RARG_RARA_6_SELEX\|RARA_7\|RAR | AGGTCAACTAAAGGTCA | TGACCTTTAGTTGACCT |
| B_3 | | |
| VENTX_VENTX_2_SELEX\|VENTX_2 | CGCTAATCGGAAAACGA | CTAATCGTTTTCCGATTA |
| | TTAG | GCG |
| GTF2I_1 | AGAGGGAGG | CCTCCCTCT |
| TCF4_da_SANGER_10_FBgn0000413_B1H | CGCAGGTGTGC | GCACACCTGCG |
| SOX1_Sox21_3417_PBM\|SOX9_pTH1729_PBM | ATTGTTTTC | GAAAACAAT |
| E2F3_E2F3_3752_PBM | ATTGGCGCGC | GCGCGCCAAT |
| IRF_known11 | CAGTTTCGGTTCTC | GAGAACCGAAACTG |
| HOXD12_1 | AAGATTTTACGACCTTG | CAAGGTCGTAAAATCTT |
| GLI1_GLI2_2_SELEX\|GL12_2 | CAGTGTGGTCGC | GCGACCACACTG |
| NKX2-5_Bapx1_2343_PBM\|NKX2-5_pTH6327_PBM\|NKX2- | ACCACTTAA | TTAAGTGGT |
| 5_Nkx2-3_3435_PBM\|NKX3-1_5\|NKX3-2_3\|NKX3-1_6 | | |
| HMX1_1 | ACAAGCAATTAATGAAT | ATTCATTAATTGCTTGT |
| THRB_THB_do_HocoMoco | GAGGTCAGGTCAGGTC | TGACCTGACCTGACCTC |
| | A | |
| HIC1_3 | ACTATGCCAACCTACC | GGTAGGTTGGCATAGT |
| PITX2_PITX2_si_HocoMoco | TGGGATTAAA | TTTAATCCCA |
| JUN_HeLa-S3_JUND_Stanford_ChIP-seq | AAGAATGAGTCATCA | TGATGACTCATTCTT |
| HMX1_VSHMX1_01_Transfac\|HMX3_1 | CAAGTGCGTG | CACGCACTTG |
| PRDM16_EVI1_f1_HocoMoco | AAGATAAGATAAGATA | TATCTTATCTTATCTT |
| HOXB2_HXB1_f1_HocoMoco | CCATCCATCA | TGATGGATGG |
| E2F4_HeLa-S3_E2F4_UCD_ChIP-seq | GGCGGGAAATTTGAA | TTCAAATTTCCCGCC |
| AP1_known1 | ACTGAGTCACC | GGTGACTCAGT |
| IKZF1_V$IK1_01_Transfac\|IKZF1_1 | ACTTGGGAATACC | GGTATTCCCAAGT |
| RARG_RARG_1_SELEX\|RARG_1 | GAGGTCAAAAGGTCAC | TGTGACCTTTTGACCTC |
| | A | |
| PAX9_GM12878_PAX5C20_HudsonAlpha_ChIP- | GCAGCCAAGCGTGAC | GTCACGCTTGGCTGC |
| seq\|PAX9_GM12892_PAX5C20_HudsonAlpha_ChIP- | | |
| seq\|PAX9_GM12878_PAX5N19_HudsonAlpha_ChIP- | | |
| seq\|PAX9_Mv108_ChIP-seq | | |
| GSC_Gsc_2327_PBM | GCTAATCCC | GGGATTAGC |
| HOXC6_pTH6164_PBM | AATAATTATA | TATAATTATT |
| REST_disc4 | GCACCAGGGACAGC | GCTGTCCCTGGTGC |
| POU2F2_4 | TATGAATATTCAAA | TTTGAATATTCATA |
| PKNOX2_MEIS2_do_HocoMoco | TGACAGCTGTCAA | TTGACAGCTGTCA |
| HSFY1_HSFY2_2_SELEX\|HSFY2_2 | CGTTCGAAA | TTTCGAACG |
| NR2F2_V$ARP1_01_Transfac\|NR2F2_1 | AGGGGTCAAGGGTTCA | TGAACCCTTGACCCCT |
| CTCF_HUVEC_CTCF_UW_ChIP-seq | CTCCGGCGCCCCCTGGT | GCCACCAGGGGGCGCC |
| | GGC | GGAG |
| POU2F2_known9 | AATTAGCATAGA | TCTATGCTAATT |
| CTCF_HepG2_CTCF_UT-A_ChIP-seq | AGTGCCACCTAGTGG | CCACTAGGTGGCACT |
| CTCF_GM06990_CTCF_UW_ChIP-seq | CTCGGGCGCCCCCTGGT | GGCCACCAGGGGGCGC |
| | GGCC | CCGAG |
| PITX2_pTH5644_PBM | AGGGATTAA | TTAATCCCT |
| RXRA_known1 | CGGGTGACCTTTGACCC | TCAGGGGTCAAAGGTC |
| | CTGA | ACCCG |
| HOXD12_pTH6533_PBM\|CDX2_pTH6515_PBM\|CDX2_pTH | GTAATTAA | TTAATTAC |
| 5553_PBM\|HOXC5_Hoxc6_3954_PBM\|NKX6-1_4\|N KX6- | | |
| 1_5\|NKX6-1_6 | | |
| NR1l2_NR1l2_U_HocoMoco | CTGAACTTTTTTGACCTC | TGAGGTCAAAAAAGTTC |
| | A | AG |
| MEOX2_Meox2_1_SELEX\|MEOX2_4 | GTAATTAC | GTAATTAC |
| TEF_TEF_1_SELEX\|TEF_Dbp_1_SELEX\|TEF_DBP_2_SELEX\| | TATTACGTAACA | TGTTACGTAATA |
| DBP_3\|DBP_4\|TEF_2 | | |
| IRF2_MA0051.1_SELEX\|IRF_known10 | GGAAAGCGAAACCAAA | GTTTTGGTTTCGCTTTCC |
| | AC | |
| NEUROG1_NEUROG2_2_SELEX\|NEUROG1_NEUROG2_1_S | AACATATGTC | GACATATGTT |
| ELEX\|NEUROG2_1\|NEUROG2_2 | | |
| AR_MA0113.2_ChIP-seq\|NR3C1_disc1 | AGAACAGAATGTTCT | AGAACATTCTGTTCT |
| GBX2_1 | AATCGCTAATTAGCGCT | AGCGCTAATTAGCGATT |
| E2F3_pTH9221_PBM | TACGCGCGTA | TACGCGCGTA |
| ATOH7_Atoh1_1_SELEX\|OLIG2_OLIG1_1_SELEX\|ATOH1_1 | AACATATGTT | AACATATGTT |
| \|OLIG1_1 | | |
| ARNT2_V$ARNT_01_Transfac\|ARNT_1 | GCGGGCACGTGACAAC | GTTGTCACGTGCCCGC |
| ETS1_ETS1_2_SELEX\|ETS_known15 | ACCGGAAGTACATCCGG | ACCGGATGTACTTCCGG |
| | T | T |
| DM BX1_Gsc_Cell_FBgn0010323_B1H | ATTAATCC | GGATTAAT |
| CTCF_N HDF-Ad_CTCF_Broad_ChIP-seq | GCCACCAGATGGCACTA | TAGTGCCATCTGGTGGC |
| GATA_known10 | AGATAAAAGGGA | TCCCTTTTATCT |
| LHX8_Lhx6_3432_PBM | GCTGATTAC | GTAATCAGC |
| MEF2_known7 | CGGTTTAAAAATAACC | GGTTATTTTTAAACCG |
| ONECUT1_1 | AAAAATCAATAA | TTATTGATTTTT |
| HOXB13_HXA13_f1_HocoMoco | CCAATAAAACC | GGTTTTATTGG |
| ETS1_ETS1_4_SELEX\|ETS_known17 | ACCGGAAGTACATCCGG | GCCGGATGTACTTCCGG |
| | C | T |
| SOX1_pTH2677_PBM | CATTGTTA | TAACAATG |
| SOX13_SOX13_f1_HocoMoco | CATTGTTC | GAACAATG |
| FOXD1_HCM1_2157_PBM | GGTAAACAA | TTGTTTACC |
| AHR::ARNT_3 | CACGCA | TGCGTG |
| INSM1_INSM1_f1_HocoMoco | TGCCCCCTGACA | TGTCAGGGGGCA |
| NFKB_disc2 | GAAATCCCCAGC | GCTGGGGATTTC |
| HNF1B_1 | GTTAAATATTAA | TTAATATTTAAC |
| SOX9_V$SOX9_B1_Transfac\|SOX9_1 | TAAGAACAATGGGA | TCCCATTGTTCTTA |
| ZNF148_Zfp281_0973_PBM | CCACCCCCCC | GGGGGGGTGG |
| HOXA2_1\|PDX1_4 | AAGGTAATTAGCTCAT | ATGAGCTAATTACCTT |
| NKX2-5_NKX21_f1_HocoMoco | AGCACTTGAG | CTCAAGTGCT |
| SRF_GM12878_SRF_HudsonAlpha_ChIP-seq | CCATGGCCAAATAAGGC | TTGCCTTATTTGGCCATG |
| | AA | G |
| ZBTB7A_disc2 | AAGGGGCG | CGCCCCTT |
| GCM1_GCM1_2_SELEX\|GCM1_3 | ATGCGGGTACCCGCAT | ATGCGGGTACCCGCAT |
| TAL1_known3 | GAGACCATCTGTTCCC | GGGAACAGATGGTCTC |
| ZIC5_MA0456.1_B1H\|ZIC5_opa_NAR_FBgn0003002_B1H | CAGCGGGGGGTC | GACCCCCCGCTG |
| ELF3_ELF3_2_SELEX\|ELF3_3 | AACCCGGAAGTAA | TTACTTCCGGGTT |
| ZBTB49_ZBTB49_1_SELEX\|ZBTB49_1 | TGACGTGCCAGGCGAA | TTTCGCCTGGCACGTCA |
| | A | |
| TEF_MA0043.1_SELEX\|HLF_2 | GGTTACGCAATA | TATTGCGTAACC |
| FOXD1_V$HFH1_01_Transfac\|FOXD1_FOXQ1_f1_HocoMo | AAATAAACAATA | TATTGTTTATTT |
| co\|FOXQ1_1 | | |
| TEF_pTH3831_PBM\|TEF_pTH5078_PBM\|NFIL3_pTH5082_ | TATTACGTAA | TTACGTAATA |
| PBM | | |
| STAT1_MA0137.3_ChIP-seq | TTTCCAGGAAA | TTTCCTGGAAA |
| NFE2L1_V$TCF11_01_Transfac | CGGCCAAAATGAC | GTCATTTTGGCCG |
| RFX8_RFX2_f1_HocoMoco | TGTTGCTAGGGAA | TTCCCTAGCAACA |
| TCF4_ato_da_SANGER_10_FBgn0000413_B1H\|ATOH7_ato | CCACCTGTCAC | GTGACAGGTGG |
| _da_SANGER_10_FBgn0010433_B1H | | |
| KLF14_pTH2353_PBM | ACCGTTAT | ATAACGGT |
| AP1_known4 | ACTTAGTCACT | AGTGACTAAGT |
| ETV5_FLI1_f1_HocoMoco | GCCACAGGAAGTGAGG | TCCTCACTTCCTGTGGC |
| | A | |
| CEBPA_V$CEBPA_01_Transfac\|CEBPA_1 | ATATTGCAAAATCA | TGATTTTGCAATAT |
| PPARA_PPARG_f1_HocoMoco | AAGTAGGTCAAAGGTC | GTGACCTTTGACCTACTT |
| | AC | |
| MEF2_known8 | AGGGTTATTTTTAGAG | CTCTAAAAATAACCCT |
| MTF1_2 | GGGCCGTGTGCAAAAA | TTTTTGCACACGGCCC |
| SIX5_known3 | AAAAGTGATACCCCATT | AATGGGGTATCACTTTT |
| NKX3-2_2 | CATAACCACTTAACAAC | GTTGTTAAGTGGTTATG |
| E2F1_E2F1_1_SELEX\|E2F_known27 | ATTGGCGCCAAA | TTTGGCGCCAAT |
| POU3F3_V$POU3F2_02_Transfac\|POU3F2_3 | ATTAACATAA | TTATGTTAAT |
| AL662830.5_exd_FlyReg_FBgn0000611_B1H | TAAAACAAAA | TTTTGTTTTA |
| DUX4_MA0468.1_ChIP-seq | TAATTTAATCA | TGATTAAATTA |
| FOXD1_FOX13_2_SELEX\|FOXD1_Foxj3_2_SELEX\|FOXD1_F | GTAAACAATAAACA | TGTTTATTGTTTAC |
| OXJ2_1_SELEX\|FOXJ2_3\|FOXJ3_3\|FOXJ3_6 | | |
| HNF1B_2 | ACGGCTAGTTAACAGCT | AGCTGTTAACTAGCCGT |
| TCF12_disc4 | AACCGAAA | TTTCGGTT |
| ARID3C_pTH9384_PBM\|ARID3C_pTH5169_PBM\|ARID3C_ | TAATTAAAA | TTTTAATTA |
| pTH9214_PBM\|ARID3B_pTH5117_PBM | | |
| ESX1_1 | ATCCATTAATTAATTGA | TCAATTAATTAATGGAT |
| SPDEF_SPDEF_1_SELEX\|SPDEF_SPDEF_4_SELEX\|SPDEF_2\| | ACCCGGATGTA | TACATCCGGGT |
| SPDEF_5 | | |
| TBX5_1 | AAAGGTGTCAAA | TTTGACACCTTT |
| CEBPA_CEBPB_f1_HocoMoco | ATTGCACAAC | GTTGTGCAAT |
| MAX_V$MAX_01_Transfac\|MYC_known2 | AAACCACGTGGTTT | AAACCACGTGGTTT |
| POU1F1_3 | GACTTAATTAATTAATC | GATTAATTAATTAAGTC |
| CTCF_GM12878_CTCF_UT-A_ChIP- | CACCAGGGGGCG | CGCCCCCTGGTG |
| seq\|CTCF_HRPEpiC_CTCF_UW_ChIP-seq | | |
| CEBPA_CEBPA_do_HocoMoco | ATTGCACAAT | ATTGTGCAAT |
| STAT5B_V$STAT5A_01_Transfac\|STAT_known4 | GAATTCCAGGAAATA | TATTTCCTGGAATTC |
| T_BRAC_si_HocoMoco | ACATAGTGACACCTAGG | ATTTCACACCTAGGTGT |
| | TGTGAAAT | CACTATGT |
| RARG_RARA_f2_HocoMoco | AGGTCACCGAGAGGTC | TGACCTCTCGGTGACCT |
| | A | |
| ZSCAN10_pTH1292_PBM | AGGAAGTGCAA | TTGCACTTCCT |
| CEBPA_pTH5166_PBM | ATTACGTAAT | ATTACGTAAT |
| EGR1_disc5 | ACCGCCCA | TGGGCGGT |
| RELA_SRP001843_p65_Input_ChIP-seq | AGAGGAGAGGAGAAGA | CTCTTCCTCCCTCCTCTT |
| | GGAGGGAGGAAGAG | CTCCTCTCCTCT |
| SIX5_disc1\|ZNF143_disc2 | ACTACAATTC | GAATTGTAGT |
| ZBTB33_known 1 | TTAGCAGGAA | TTCCTGCTAA |
| BARX1_Barx1_2877_PBM\|BARHL2_BARHL2_5_SELEX\|BAR | AGCAATTAGC | GCTAATTGCT |
| HL2_Barhl1_2_SELEX\|BARHL2_6\|BARHL1_3 | | |
| SPZ1_2 | AGGGTAACAGC | GCTGTTACCCT |
| OTX1_1 | ATAAATTAATCCCCTCC | GGAGGGGATTAATTTAT |
| HMGA2_HMGA2_f1_HocoMoco | AATAATCGCGAATAT | ATATTCGCGATTATT |
| TFAP2A_MA0524.1_ChIP-seq | CATGGCCCCAGGGCA | TGCCCTGGGGCCATG |
| SP9_pTH4998_PBM | GGGGGCGGA | TCCGCCCCC |
| EN2_En2_1_SELEX\|EMX2_EMX2_1_SELEX\|HOXC5_HOXD8 | GCTAATTAGC | GCTAATTAGC |
| _1_SELEX\|DMBX1_ALX3_1_SELEX\|NOTO_NOTO_1_SELEX\| | | |
| EMX2_EMX1_1_SELEX\|ALX3_2\|EMX1_1\|EMX2_2\|EN2_4\| | | |
| HOXD8_2\|NOTO_1 | | |
| POU6F2_POU6F2_3_SELEX\|POU6F2_3 | GCTAATTAGA | TCTAATTAGC |
| ZNF143_disc4 | CCAGCGCCCGC | GCGGGCGCTGG |
| POU3F3_POU3F1_2_SELEX\|POU3F1_3 | ATGCATAATTTA | TAAATTATGCAT |
| HOXA5_2 | AATTAGTG | CACTAATT |
| PAX1_1 | ATATCTAGAGCGGAACG | CCGTTCCGCTCTAGATA |
| | G | T |
| ATF3_disc2 | GGCGCGCGGCGGTGAC | GTCACGTCACCGCCGCG |
| | GTGAC | CGCC |
| PAX4_V$PAX4_01_Transfac\|PAX4_1 | GGCGGTCATGCGTGCG | GGTCGCGCACGCATGAC |
| | CGACC | CGCC |
| AL662830.5_V$PBX1_01_Transfac\|PBX1_1 | ATCAATCAA | TTGATTGAT |
| LHX8_1 | ACCCCTAATTAGCGGTG | CACCGCTAATTAGGGGT |
| RHOXF1_RHOXF1_2_SELEX\|RHOXF1_4 | ATAATCCC | GGGATTAT |
| E2F1_HeLa-53_E2F1_UCD_ChIP-seq | CCGCGCGCCCTCCCC | GGGGAGGGCGCGCGG |
| DLX1_DLX2_f1_HocoMoco | ATAATTAT | ATAATTAT |
| HIC1_4 | GTGCCAGCCTATGCCAA | GTTGGCATAGGCTGGCA |
| | C | C |
| TBX1_TBX20_3_SELEX\|TBX20_3 | CTTTCACACCTTTTC | GAAAAGGTGTGAAAG |
| HSF2_HSF2_si_HocoMoco | AGAATGTTCTAGAA | TTCTAGAACATTCT |
| CTCF_disc1 | ACCACTAGATGGCACTA | TGCAATAGTGCCATCTA |
| | TTGCA | GTGGT |
| HNF4_disc5 | ACAAAGGGC | GCCCTTTGT |
| FOXD1_pTH9116_PBM | ATGTAAACAAA | TTTGTTTACAT |
| DLX1_DLX5_1_SELEX\|DLX5_2 | ATAATTAC | GTAATTAT |
| POU3F3_Oct- | ATAATTAA | TTAATTAT |
| 1_PBM\|HOXC5_Dfd_FlyReg_FBgn0000439_B1H | | |
| VSX2_VSX1_1_SELEX\|HOXA4_1\|VSX1_2 | ATAATTAG | CTAATTAT |
| DLX3_1 | GTCGGTAATTATCGCGA | TCGCGATAATTACCGAC |
| PAX2_3 | AGTCACGC | GCGTGACT |
| SOX1_SOX2_5_SELEX\|SOX2_6 | TATCAATAACATTGATA | TATCAATGTTATTGATA |
| SOX9_SOX8_4_SELEX\|SOX8_5 | CATCAATTGCAGTGATC | GATCACTGCAATTGATG |
| PAX2_MA0067.1_SELEX | AGTCACGG | CCGTGACT |
| ESRRA_known5 | TATTCAAGGTCATGCGA | TCGCATGACCTTGAATA |
| NFATC1_NFATC1_2_SELEX\|NFATC1_2 | TTTCCATAATGGAAA | TTTCCATTATGGAAA |
| SMAD_1 | AGACACCAC | GTGGTGTCT |
| FOXD1_FOXB1_3_SELEX\|FOXD1_FOXC1_3_SELEX\|FOXB1_ | ATATTTACATA | TATGTAAATAT |
| 3\|FOXC1_5 | | |
| SRF_V$SRF_C_Transfac\|SRF_known3 | CTGGCCATATATGGC | GCCATATATGGCCAG |
| TCF4_TCF4_1_SELEX\|TCF4_1 | AGCAGGTGCG | CGCACCTGCT |
| EGR1_disc6 | CCCCGGCCTCC | GGAGGCCGGGG |
| RAD21_disc9 | ACTAGACGAGATG | CATCTCGTCTAGT |
| SMAD1_SMAD1_si_HocoMoco | AGCCTGTCTGCC | GGCAGACAGGCT |
| IRF_known8 | CTTTCACTTTC | GAAAGTGAAAG |
| GMEB1_1 | CCATCGTACGTACACTC | GAGTGTACGTACGATG |
| | | G |
| DMBX1_V$CART1_01_Transfac\|ALX1_1 | AACTAATTACCATTATC | CGATAATGGTAATTAGT |
| | G | T |
| CREB3L2_CrebA_SANGER_5_FBgn0004396_B1H | GATTACGTGGCA | TGCCACGTAATC |
| HOXA7_1 | AGATTGG | CCAATCT |
| FOXD1_FOXF2_f1_HocoMoco | AAAAGTAAACA | TGTTTACTTTT |
| EOMES_TBX21_6_SELEX\|TBX21_6 | TCACACCTAAAAGGTGT | TCACACCTTTTAGGTGT |
| | GA | GA |
| ATF3_known9 | CGATGACGTCAGAG | CTCTGACGTCATCG |
| IRX3_MA0210.1_B1H\|IRX3_MA0217.1_B1H | TAACA | TGTTA |
| USF1_H1-hESC_USF1_HudsonAlpha_ChIP-seq | CGCGGCCACGTGACC | GGTCACGTGGCCGCG |
| FOXD1_MA0030.1_SELEX\|FOXF2_2 | ATTGTTTACGTTTG | CAAACGTAAACAAT |
| RHOXF1_1 | AAGACGCTGTAAAGCG | TCGCTTTACAGCGTCTT |
| | A | |
| GATA2_srp_FlyReg_FBgn0003507_B1H | ATCAACCGATAG | CTATCGGTTGAT |
| ATF7_pTH5081_PBM | GATGACGTCA | TGACGTCATC |
| MEF2_disc2 | AGGAAATGA | TCATTTCCT |
| FOXP4_CG2052_SANGER_2.5_FBgn0039905_B1H | AAAACCAAAAAAAT | ATTTTTTTGGTTTT |
| TFCP2_1 | CTGGGTTGTGC | GCACAACCCAG |
| SOX13_MA0087.1_SELEX\|SOX5_2 | AAACAAT | ATTGTTT |
| PITX2_Pitx3_3497_PBM\|DRGX_Crx_3485_PBM\|OTX2_Oc_ | GGGATTAA | TTAATCCC |
| SOLEXA_FBgn0004102_B1H\|RHOXF1_RHOXF1_4_SELEX\|C | | |
| RX_pTH10716_PBM\|OTP_Otx2_3441_PBM\|PITX2_Pitx2_2 | | |
| 274_PBM\|PITX2_PITX1_3_SELEX\|DRGX_Otx1_2325_PBM\| | | |
| RHOXF1_6\|PITX1_4 | | |
| SHOX_MA0075.1_SELEX\|PRRX2_2 | AATTA | TAATT |
| ATF3_Jundm2_0911_PBM\|ATF1_Atf1_3026_PBM\|ATF3_p | GATGACGTAA | TTACGTCATC |
| TH5464_PBM | | |
| ETV7_1 | CAGGAAGTAG | CTACTTCCTG |
| RARG_RARG_6_SELEX\|RARG_6 | AAGGTCAACAGAGGTC | TGACCTCTGTTGACCTT |
| | A | |
| EGR1_known3 | GTCGCCCCCAC | GTGGGGGCGAC |
| CDX2_V$CDXA_01_Transfac | ATTTATG | CATAAAT |
| E2F1_V$E2F_01_Transfac\|E2F_known1 | CAGTTTTCGCGCGTA | TACGCGCGAAAACTG |
| RELA_GM15510_NFKB_Stanford_ChIP-seq | AGGGGATTTCCAGG | CCTGGAAATCCCCT |
| SRY_V$SRY_01_Transfac\|SRY_1 | AAACAAA | TTTGTTT |
| ESRRG_MA0141.2_ChIP-seq | AGGTCAAGGTCA | TGACCTTGACCT |
| HOXC5_HXA5_si_HocoMoco\|HOXC5_HX67_si_HocoMoco | CATTAATCAA | TTGATTAATG |
| MAF_known1 | AGGCAACTTCCCTCTA | TAGAGGGAAGTTGCCT |
| YY2_K562_YY1_HudsonAlpha_ChIP-seq | ACCCAAGATGGCGGC | GCCGCCATCTTGGGT |
| PPARA_PPARA_f1_HocoMoco\|NR5A1_ftz- | AAGGTCA | TGACCTT |
| f1_SANGER_5_FBgn0001078_B1H\|NR2F2_svp_SANGER_5 | | |
| FBgn0003651_B1H | | |
| AP1_known6 | GAATGAGTCAGCA | TGCTGACTCATTC |
| CDX2_MA0465.1_ChIP-seq | AAGCCATAAAA | TTTTATGGCTT |
| MAFB_MA0117.1_SELEX\|MAF_known3 | GCGTCAGC | GCTGACGC |
| NFE2L1::MAFG_2 | CATGAC | GTCATG |
| HOXC5_Hoxa3_2783_PBM | AGGTCATTAA | TTAATGACCT |
| PPARA_PPARD_f1_HocoMoco | TAGGACAAAGGTCA | TGACCTTTGTCCTA |
| YY2_pho_SOLEXA_5_FBgn0002521_B1H | ACCAAAATGGCGGCC | GGCCGCCATTTTGGT |
| HNF4_known9 | GGGGCAAAGTTCAA | TTGAACTTTGCCCC |
| ELF3_ELF3_1_SELEX\|ELF3_EHF_1_SELEX\|EHF_2\|ELF3_2 | AACCCGGAAGTA | TACTTCCGGGTT |
| ELF1_ELF1_1_SELEX\|ELF1_ELF1_2_SELEX\|ELF1_ELF4_1_SE | AACCCGGAAGTG | CACTTCCGGGTT |
| LEX\|ELF1_known2\|ELF1_known3\|ELF4_1 | | |
| MYOD1_MYF6_f1_HocoMoco\|TFCP2_2 | CAGCTGC | GCAGCTG |
| SOX17_MA0078.1_SELEX\|SOX17_2 | CTCATTGTC | GACAATGAG |
| MAFK_K562_MAFK_Stanford_ChIP-seq | AATTGCTGACTCAGC | GCTGAGTCAGCAATT |
| ZNF740_1 | CAAGTGGGGGGGGGG | CCCCCCCCCCCACTTG |
| | G | |
| MAX_MAX_f1_HocoMoco | ACCACGTGGCT | AGCCACGTGGT |
| PKNOX2_Pknox2_1_SELEX\|PKNOX2_Meis3_2_SELEX\|PKN | TGACACCTGTCA | TGACAGGTGTCA |
| OX2_Meis2_2_SELEX\|PKNOX2_PKNOX1_1_SELEX\|PKNOX2 | | |
| _PKNOX2_1_SELEX\|MEIS1_MEIS3_2_SELEX\|MEIS3_3\|MEI | | |
| S2_4\|MEIS3_5\|PKNOX1_2\|PKNOX2_2\|PKNOX2_3 | | |
| E2F6_HeLa-S3_E2F6_UCD_ChIP- | GGGGCGGGAAA | TTTCCCGCCCC |
| seq\|E2F6_K562b_E2F6_UCD_ChIP-seq | | |
| NFKB_known6 | GGCGGGGAAATTCCCC | GGGGAATTTCCCCGCC |
| RAX_1 | GTGCGCTAATTAGTGCA | TGCACTAATTAGCGCAC |
| PAX2_V$PAX2_01_Transfac | CCTCGTCACGCATGATG | GCCATCATGCGTGACGA |
| | GC | GG |
| MYC_disc2 | ACCACGTGGCC | GGCCACGTGGT |
| PAX2_1 | CCTCGTCACGCATGATG | TCCATCATGCGTGACGA |
| | GA | GG |
| E2F2_E2F2_3_SELEX\|E2F2_4 | AAAATGGCGCCATTTT | AAAATGGCGCCATTTT |
| SOX9_Sox10_1_SELEX\|SOX11_Sox11_1_SELEX\|SOX10_8\|S | AACAATTTCAGTGTT | AACACTGAAATTGTT |
| OX11_2 | | |
| GATA2_T-47D_GATA3_HudsonAlpha_ChIP-seq | ACAGATTCTTATCTG | CAGATAAGAATCTGT |
| PKNOX2_MEIS1_f2_HocoMoco | CATAAAACTGTCA | TGACAGTTTTATG |
| SIX6_Six6_2267_PBM | GAATGATATCC | GGATATCATTC |
| E2F3_pTH9288_PBM | AGCGCGCGCG | CGCGCGCGCT |
| ESRRA_known2 | AGATCAAGGTCATA | TATGACCTTGATCT |
| TCF7L2_I$TCF_1_Transfac | AAGATCAAAGG | CCTTTGATCTT |
| JUN_pTH3064_PBM | TGACTCAA | TTGAGTCA |
| ESRRG_ECC-1_ERALPHA_HudsonAlpha_ChIP-seq | AGGTCACCGTGACCT | AGGTCACGGTGACCT |
| ID4_ID4_1_SELEX\|ID4_1 | GACAGGTGTA | TACACCTGTC |
| ZSCAN4_ZSCAN4_1_SELEX\|ZSCAN4_3 | TGCACACACTGAAAA | TTTTCAGTGTGTGCA |
| TFAP2_known10 | ATTGCCTGAGGCGAA | TTCGCCTCAGGCAAT |
| ESR2_ESR2_do_HocoMoco | AGGTCACCGTGACCC | GGGTCACGGTGACCT |
| SIX2_Six1_0935_PBM\|SIX6_pTH5928_PBM | ATGATACCCC | GGGGTATCAT |
| RARG_RARG_2_SELEX\|RARG_2 | AAGGTCAACTAAAGGTC | TGACCTTTAGTTGACCTT |
| | A | |
| TBX1_TBX20_1_SELEX\|TBX1_TBX20_5_SELEX\|TBX20_1\|TB | AGGTGTGAAGGTGTGA | TCACACCTTCACACCT |
| X20_5 | | |
| BARHL2_BARHL2_6_SELEX\|BARHL2_7 | CAATTAGCACCAATTA | TAATTGGTGCTAATTG |
| HNF4_known14 | AGGCCAAAGGTCA | TGACCTTTGGCCT |
| NR1H4_1 | CAAGGTCATTAACC | GGTTAATGACCTTG |
| NHLH2_HLH4C_da_SANGER_5_3_FBgn0011277_B1H\|TCF4 | CACCTGCTCC | GGAGCAGGTG |
| HLH4C_da_SANGER_5_3_FBgn0000413_B1H | | |
| LMX1B_1 | AGTTTTTAATTAATTTG | CAAATTAATTAAAAACT |
| TCF7L2_known1 | CCTTTGAA | TTCAAAGG |
| HNF1A_2 | ACTTAGTTAACTAAAAA | TTTTTAGTTAACTAAGT |
| E2F_disc1\|HEY1_disc1 | GGTGACGTCA | TGACGTCACC |
| FOXD1_Foxj3_0982_PBM\|FOXD1_pTH6549_PBM | TGTAAACAAA | TTTGTTTACA |
| EGR3_EGR3_f1_HocoMoco | ACACCCACTCT | AGAGTGGGTGT |
| SP1_pTH5421_PBM | CATGCAGC | GCTGCATG |
| AL662830.5_PBX2_f1_HocoMoco | CCATCAATCAATTTA | TAAATTGATTGATGG |
| IRX3_Mirr_Cell_F Bgn0014343_B1H | AAAAAACA | TGTTTTTT |
| REST_disc6 | ACAGCGCT | AGCGCTGT |
| EOMES_1 | AATTTTCACACCTTTTA | TAAAAGGTGTGAAAATT |
| HF1H36_1 | GCCCCTCCCCCACC | GGTGGGGGAGGGGC |
| NR1D2_NR1D1_f1_HocoMoco | AAAAGTAGGTCAGA | TCTGACCTACTTTT |
| BCL_disc8 | CCCCGCTGCCCGGC | GCCGGGCAGCGGGG |
| S N3A_disc3 | ACCATGGACAG | CTGTCCATGGT |
| EOMES_EOMES_2_SELEX\|EOMES_3 | TCACACCTTAGAAGGTG | TCACACCTTCTAAGGTG |
| | TGA | TGA |
| HDAC2_disc4 | CGCGCGCGCG | CGCGCGCGCG |
| ARX_1 | GTCCATTAATTAATGGA | TCCATTAATTAATGGAC |
| HOXC10_Hoxc9_2367_PBM\|MNX1_MNX1_1_SELEX\|MNX | GGTAATTAAA | TTTAATTACC |
| 1_2 | | |
| LCOR_pTH8558_PBM | AATTTTGGG | CCCAAAATT |
| HOXB2_HOXA1_1_SELEX\|HOXA1_2 | GGTAATTAAC | GTTAATTACC |
| ZNF35_1 | AACAAACAACAAGAG | CTCTTGTTGTTTGTT |
| CEBPG_CEBPG_2_SELEX\|CEBPA_pTH5460_PBM\|CEBPA_C | ATTGCGCAAT | ATTGCGCAAT |
| EBPB_1_SELEX\|CEBPA_CEBPB_2_SELEX\|CEBPG_CEBPG_1_ | | |
| SELEX\|CEBPA_Cebpb_1_SELEX\|CEBPA_CEBPE_1_SELEX\|CE | | |
| BPA_CEBPD_1_SELEX\|CEBPB_disc1\|CEBPB_known8\|CEBP | | |
| B_known9\|CEBPD_2\|CEBPE_1\|CEBPG_2\|CEBPG_3\|CEBPB | | |
| known 10 | | |
| YY1_phol_SANGER_5_FBgn0035997_B1H\|TATA_disc1 | CAAGATGGCG | CGCCATCTTG |
| HOXD12_HOXC12_2_SELEX\|HOXC12_3 | GGTCGTAAAAA | TTTTTACGACC |
| STAT5B_V$STAT5A_02_Transfac\|STAT_known6 | CTCTAGGAAACGCAATT | TTCCCAGAATTGCGTTTC |
| | CTGGGAA | CTAGAG |
| TCF3_6 | ATCCACAGGTGCGAAAA | TTTTCGCACCTGTGGAT |
| MEF2B_MEF2A_1_SELEX\|MEF2_known12 | TCTAAAAATAGA | TCTATTTTTAGA |
| BATF_BATF_si_HocoMoco | ATGAGTCATA | TATGACTCAT |
| DMBX1_MA0190.1_B1H\|OTX2_MA0234.1_B1H | GGATTA | TAATCC |
| NPAS2_gce_Clk_SANGER_5_FBgn0023076_B1H\|MYCN_M | CACGTGGC | GCCACGTG |
| A0104.3_ChIP-seq | | |
| FOXD1_FOXF1_f1_HocoMoco | AAAATAAACAT | ATGTTTATTTT |
| EGR3_pTH2820_PBM | CCGCCCACGC | GCGTGGGCGG |
| GLI1_GLI3_si_HocoMoco\|GLI1_GSE11062_Gli3_ChIP-seq | CTGGGTGGTCC | GGACCACCCAG |
| EP300_disc5 | AAAGAGGAAGTGAAA | TTTCACTTCCTCTTT |
| IRX3_Irx3_1_SELEX\|IRX3_3 | CTACATGACAAA | TTTGTCATGTAG |
| AL662830.5_Pbx1_3203_PBM | CCCATCAAA | TTTGATGGG |
| HAND1_1 | AATGCCAGACGCCATT | AATGGCGTCTGGCATT |
| E2F_known18 | GTTTGGCGCGAA | TTCGCGCCAAAC |
| MXI1_disc1 | CCGTCGCCATGGCAAC | GTTGCCATGGCGACGG |
| NR1H2_NR1H2_f1_HocoMoco | CGTTGACCTTTGACCTTT | TAAAGGTCAAAGGTCAA |
| | A | CG |
| SMAD2_SMAD3_1_SELEX\|SMAD3_3 | CGTCTAGACA | TGTCTAGACG |
| SP9_SP4_1_SELEX\|SP4_2 | AAAGGGGGCGTGGCTT | TAAGCCACGCCCCCTTT |
| | A | |
| TAL1_known1 | CCGACCATCTGTTCAG | CTGAACAGATGGTCGG |
| BARHL2_pTH6503_PBM | AACCAATTAATAT | ATATTAATTGGTT |
| GBX2_Unpg_SOLEXA_FBgn0015561_B1H\|MEOX2_Btn_SO | TAATTAA | TTAATTA |
| LEXA_FBgn0014949_B1H\|SHOX_CG11294_SOLEXA_FBgn0 | | |
| 030058_B1H\|EN2_En_SOLEXA_FBgn0000577_B1H\|VSX2_ | | |
| MA0181.1_B1H\|LHX1_Lim3_SOLEXA_FBgn0002023_B1H\| | | |
| SHOX_MA0172.1_B1H\|HLX_Hlx1_2350_PBM\|LBX2_Lbe_S | | |
| OLEXA_FBgn0011278_B1H\|HOXA4_MA0257.1_B1H\|HOXC | | |
| 6_MA0230.1_B1H\|LHX9_Ap_SOLEXA_FBgn0000099_B1H\| | | |
| RAX2_Repo_SOLEXA_FBgn0011701_B1H\|SHOX_Otp_SOLE | | |
| XA_FBgn0015524_B1H\|EMX2_E5_SOLEXA_FBgn0008646_ | | |
| B1H\|HOXC5_MA0238.1_B1H\|EN2_MA0220.1_B1H\|SHOX_ | | |
| Pph13_SOLEXA_FBgn0023489_B1H\|ALX1_CG9876_SOLEX | | |
| A_FBgn0034821_B1H\|ALX1_AI_Cell_FBgn0000061_B1H\|H | | |
| OXA4_Zen2_SOLEXA_FBgn0004054_B1H\|ALX1_MA0208.1 | | |
| _B1H\|ALX1_MA0179.1_B1H\|TLX3_MA0170.1_B1H\|LHX1_ | | |
| Lim1_SOLEXA_FBgn0026411_B1H\|HOXC5_MA0206.1_B1H | | |
| \|SHOX_Hbn_Cell_F Bgn0008636_B1H\|NKX1- | | |
| 1_MA0245.1_B1H\|HOXC5_Pb_SOLEXA_FBgn0051481_B1H | | |
| \|HOXC5_Ftz_SOLEXA_FBgn0001077_B1H\|HLX_MA0448.1_ | | |
| B1H\|ALX1_Rx_SOLEXA_FBgn0020617_B1H\|RAX2_MA0240 | | |
| .1_B1H\|NKX6- | | |
| 3_MA0191.1_B1H\|LHX1_MA0195.1_B1H\|SHOX_MA0457. | | |
| 1_B1H\|ALX1_CG32532_Cell_FBgn0052532_B1H\|VSX2_CG | | |
| 4136_Cell_FBgn0029775_B1H\|HOXC6_Lab_Cell_FBgn0002 | | |
| 522_B1H\|LMX1A_Lmx1b_3433_PBM\|VSX2_CG4136_SOLE | | |
| XA_FBgn0029775_B1H\|HOXC6_Lab_SOLEXA_FBgn000252 | | |
| 2_B1H\|EMX2_MA0189.1_B1H\|NKX1- | | |
| 1_Slou_SOLEXA_FBgn0002941_B1H\|LHX1_MA0194.1_B1H | | |
| \|ALX1_CG32532_SOLEXA_FBgn0052532_B1H\|SHOX_CG11 | | |
| 294_Cell_FBgn0030058_B1H\|SHOX_MA0226.1_B1H\|LHX1 | | |
| _Lim1_Cell_FBgn0026411_B1H\|GBX2_MA0251.1_B1H\|EM | | |
| X2_Ems_SOLEXA_FBgn0000576_B1H\|HLX_H2.0_Cell_FBgn | | |
| 0001170_B1H\|SHOX_MA0236.1_B1H\|LMX1A_MA0178.1_ | | |
| B1H | | |
| BX088580.2_POU3F4_2_SELEX\|POU3F4_3 | TAATTTATGCA | TGCATAAATTA |
| ZNF263_disc1 | CCTCCTCCCC | GGGGAGGAGG |
| HOXC10_Hoxd9_3_SELEX\|HOXD9_3 | GTCGTAAAA | TTTTACGAC |
| LM02_V$LMO2COM_01_Transfac | CAGCACCTGGCG | CGCCAGGTGCTG |
| BACH1_BACH1_si_HocoMoco | ACCATGACTCAGCA | TGCTGAGTCATGGT |
| NFE2_disc3 | CACGTGGCCC | GGGCCACGTG |
| SP9_CG5669_SANGER_10_FBgn0039169_B1H | AGGGGGCGGGGCCAA | TTGGCCCCGCCCCCT |
| OTP_OTX2_2_SELEX\|OTX2_3 | AGGATTAA | TTAATCCT |
| DRGX_OTX1_f1_HocoMoco | AGGATTAG | CTAATCCT |
| MYC_known9 | CAAGTAACACGTGACAC | CAAGTGTCACGTGTTAC |
| | TTG | TTG |
| IRF_disc4 | AGGGGGCGGGGCCAG | CTGGCCCCGCCCCCT |
| ATF3_ATF3_f1_HocoMoco | GTGACGCCA | TGGCGTCAC |
| HES5_HES5_1_SELEX\|HES5_1 | CGGCACGTGCCA | TGGCACGTGCCG |
| HES5_HES5_2_SELEX | CGGCACGTGCCG | CGGCACGTGCCG |
| MYC_known5 | TACCACGTGTCA | TGACACGTGGTA |
| BARHL2_1 | AAAAACCAATTAAGAA | TTCTTAATTGGTTTTT |
| SOX17_1 | AACAAT | ATTGTT |
| MEF2B_MEF2D_f1_HocoMoco | GCTAAAAATAGC | GCTATTTTTAGC |
| IRF5_IRF5_2_SELEX\|IRF_known16 | AACCGAAACCA | TGGTTTCGGTT |
| RFX5_disc2 | AGCCAATCAG | CTGATTGGCT |
| CEBPA_V$CEBPB_02_Transfac\|CEBPB_known2 | ATATTGCACAACTC | GAGTTGTGCAATAT |
| TP53_4 | ACATGCCCGGGCATGTC | CCGGACATGCCCGGGC |
| | CGG | ATGT |
| REST_H1-hESC_NRSF_HudsonAlpha_ChIP-seq | AGCACCATGGACAGC | GCTGTCCATGGTGCT |
| MYOD1_3 | CCGAAGCAGGTGGCGA | CTTCGCCACCTGCTTCG |
| | AG | G |
| ZNF740_Zfp740_1_SELEX\|ZNF740_ZNF740_1_SELEX\|ZNF7 | CCCCCCCCAC | GTGGGGGGGG |
| 40_ZNF740_2_SELEX\|ZNF740_2\|ZNF740_3\|ZNF740_4 | | |
| NOBOX_2 | CGCGCTAATTAGGTATC | GATACCTAATTAGCGCG |
| ZBTB7C_ZBTB7A_1_SELEX\|ZBTB7A_known3 | GGCGACCACCGA | TCGGTGGTCGCC |
| MYBL1_MA0100.2_ChIP-seq | CCAACTGCCA | TGGCAGTTGG |
| GFI1_1 | AAAAAATAAATCACAGC | GGCATATGCTGTGATTT |
| | ATATGCC | ATTTTTT |
| KLF7_1 | ATAGGGGCGGGGTCGA | TCGACCCCGCCCCTAT |
| POU2F2_known10 | GATTTGCATA | TATGCAAATC |
| MYOD1_1 | CAACAGGTGGTG | CACCACCTGTTG |
| ALX1_PRRX1_f1_HocoMoco | CAGATTA | TAATCTG |
| CTCF_HMEC_CTCF_UW_ChIP-seq | CCACCAGGGGGCGCCA | CTGGCGCCCCCTGGTGG |
| | G | |
| TCF7L2_Lef1_3504_PBM\|TCF7L1_Tcf7l2_3461_PBM | AGATCAAAGG | CCTTTGATCT |
| ZBTB7C_K562_ZBTB7A_HudsonAlpha_ChIP-seq | CCGAGACCCCTGCCC | GGGCAGGGGTCTCGG |
| TBX5_3 | AAGGTGTGAG | CTCACACCTT |
| TATA_known6 | TATTTATATATAAAGA | TCTTTATATATAAATA |
| EOMES_TBX21_5_SELEX\|TBX3_pTH3751_PBM\|TBX1_pTH | AAGGTGTGAA | TTCACACCTT |
| 3777_PBM\|EOMES_TBX21_2_SELEX\|TBX21_2\|TBX21_5 | | |
| OLIG2_BHLHE22_1_SELEX\|BHLHE22_1 | AAACATATGTTT | AAACATATGTTT |
| HOXA11_1 | ATGTTTTACGACTTTA | TAAAGTCGTAAAACAT |
| ETV5_ERG_2_SELEX\|ETV5_FLI1_4_SELEX\|ETV5_FLI1_2_SE | ACCGGAAATCCGGT | ACCGGATTTCCGGT |
| LEX\|ETV5_ERG_4_SELEX\|ERG_2\|ERG_4\|FLI1_2\|FLI1_4 | | |
| ESRRG_Esrra_1_SELEX\|ESRRA_known10 | TAGGTCAGTCAAGGTCA | TGACCTTGACTGACCTA |
| FOXD1_Foxj3_1_SELEX\|FOXJ3_5 | ACGGACACAAT | ATTGTGTCCGT |
| IRF1_MA0050.2_ChIP-seq | AAAGTGAAAGTGAAAG | TTTTACTTTCACTTTCAC |
| | TAAAA | TTT |
| SOX1_1 | AATCAATTCAATAATT | AATTATTGAATTGATT |
| CDC5L_CDC5L_si_HocoMoco | ATTATGTTAAATCAC | GTGATTTAACATAAT |
| SIX5_disc2\|ZNF143_disc1 | GGGAATTGTA | TACAATTCCC |
| GATA_known11 | AGATAAG | CTTATCT |
| HNF4G_Mv81_ChIP-seq\|HNF4G_MA0114.2_ChIP-seq | CTGGACTTTGGACTC | GAGTCCAAAGTCCAG |
| HOXC10_Hoxa10_2318_PBM\|HOXC10_Hoxa11_2218_PB | GGTCATAAA | TTTATGACC |
| M | | |
| DMRTC2_pTH9387_PBM | AAATGTAA | TTACATTT |
| FOXO6_FOXO1_1_SELEX\|FOXP4_pTH5656_PBM\|FOXD1_F | GTAAACAA | TTGTTTAC |
| OXJ3_1_SELEX\|FOXP4_pTH1288_PBM\|FOXD1_Foxj3_3_SE | | |
| LEX\|FOXD1_Foxk1_2323_PBM\|FOXD1_pTH5501_PBM\|FO | | |
| XD1_Foxa2_2830_PBM\|FOXO6_FOXO3_2_SELEX\|KIAA041 | | |
| 5_FKH2_4517_PBM\|FOXD1_pTH6638_PBM\|FOXO6_pTH3 | | |
| 749_PBM\|FOXD1_pTH6729_PBM\|FOXD1_pTH6734_PBM1 | | |
| FOXD1_s1p2_SANGER_5_FBgn0004567_B1H\|FOXD1_FOXJ | | |
| 2_2_SELEX\|FOXJ2_4\|FOXJ3_2\|FOXO1_3\|FOXO3_5\|FOXJ3 | | |
| 7 | | |
| LBX2_1 | TCGCATTAATTAATGCA | TGCATTAATTAATGCGA |
| YY2_GM12878_YY1_HudsonAlpha_ChIP-seq | CAAGATGGCGGCCGC | GCGGCCGCCATCTTG |
| GATA2_V$GATA1_06_Transfac | ATAGATAAGA | TCTTATCTAT |
| MYC_known19 | CCCGACCACGTGGTCA | TGACCACGTGGTCGGG |
| REST_V%NRSF_01_Transfac\|REST_known1 | GGCGCTGTCCGTGGTGC | TTCAGCACCACGGACAG |
| | TGAA | CGCC |
| SP9_Sp1_SANGER_5_FBgn0020378_B1H | GCCACGCCCAC | GTGGGCGTGGC |
| NR3C1_disc4 | AACCAAGATGGCGGC | GCCGCCATCTTGGTT |
| EGR1_known6 | CAGATGCCGCCCACGCA | GAATAATGCGTGGGCG |
| | TTATTC | GCATCTG |
| PKNOX2_V$ME1S1_01_Transfac\|MEIS1_1 | CAGTGACAGGTC | GACCTGTCACTG |
| ZNF524_ZNF524_2_SELEX\|ZNF524_2 | CTCGAACCCGTGCC | GGCACGGGTTCGAG |
| SMAD4_Med_FlyReg_FBgn0011655_B1H | ATTGCCCGCCGC | GCGGCGGGCAAT |
| E2F3_MA0469.1_ChIP-seq | CTCCCGCCCCCACTC | GAGTGGGGGCGGGAG |
| POU3F3_V$OCT1_07_Transfac | AATTAGCATACA | TGTATGCTAATT |
| IRF4_1 | CGTATCGAAACCAAA | TTTGGTTTCGATACG |
| MYC_disc8 | ACCGCGTG | CACGCGGT |
| CUX1_CUX1_2_SELEX\|CUX1_9 | ATCGATAACCTGATCGA | ATCGATCAGGTTATCGA |
| | T | T |
| ETS_known8 | CGGAAG | CTTCCG |
| SOX13_Sox5_3459_PBM | AGAACAAT | ATTGTTCT |
| NR1D2_Eip75B_SANGER_5_FBgn0000568_B1H | TATGTGGGTCA | TGACCCACATA |
| KLF4_CG9895_SANGER_10_FBgn0034810_B1H | AATGGGCGTGGC | GCCACGCCCATT |
| HEY1_Hey_SANGER_5_FBgn0027788_B1H | CAGCCGACACGTGCCCC | GGGGCACGTGTCGGCT |
| | | G |
| PKNOX2_Meis1_2335_PBM | AGCTGTCAA | TTGACAGCT |
| CTCF_HSMM_CTCF_Broad_ChIP-seq | CCACCAGAGGGCGCTAT | TATAGCGCCCTCTGGTG |
| | A | G |
| DMRT2_pTH9189_PBM | TAATACATTA | TAATGTATTA |
| MEIS1_3 | AAAGACCTGTCAATAC | GTATTGACAGGTCTTT |
| TGIF1_2 | ACGCAGCTGTCAATATC | GATATTGACAGCTGCGT |
| HSF2_1 | AGAATATTCG | CGAATATTCT |
| HNF4G_MA0484.1_ChIP-seq | AGAGTCCAAAGTCCA | TGGACTTTGGACTCT |
| FOXA_known7 | AAAAAGTAAACAAAGA | GTCTTTGTTTACTTTTT |
| | C | |
| NR2C2_MA0504.1_ChIP-seq | AGGGGTCAGAGGTCA | TGACCTCTGACCCCT |
| AR_PRGR_do_HocoMoco | AGAACAGTCTGTA | TACAGACTGTTCT |
| AIRE_AIRE_f2_HocoMoco | ATTGGTTATATTGGTTA | TTAACCAATATAACCAA |
| | A | T |
| DLX1_1 | ATTAATTACCTCAG | CTGAGGTAATTAAT |
| PAX5_known4 | AGAGCACTGAAGCGTA | CGGTTACGCTTCAGTGC |
| | ACCG | TCT |
| PROP1_1 | CGAATTAATTAAGAAAC | GTTTCTTAATTAATTCG |
| SOX14_1 | GATAATTATAATTAGC | GCTAATTATAATTATC |
| ETV5_Elk3_PBM\|ETV5_Elk4_PBM\|ELF1_Elf2_PBM\|ETV5_F | AACCGGAAGT | ACTTCCGGTT |
| Ii1_PBM\|ENSG00000235187_Etv3_PBM\|ETV5_Erg_PBM\|E | | |
| TV6_Etv6_PBM\|ENSG00000235187_Gm4881_PBM\|ETV5_ | | |
| Elk1_PBM\|ETV5_Gabpa_2829_PBM\|ELF1_Elf4_PBM\|ETV5 | | |
| _Ets1_PBM | | |
| DMRT1_1 | GCAACAATGTATCAA | TTGATACATTGTTGC |
| ARNT2_dys_tgo_SANGER_5_FBgn0015014_B1H\|NPAS4_d | AAATCGTGACT | AGTCACGATTT |
| ys_tgo_SANGER_5_FBgn0039411_B1H | | |
| NFYA_NFYA_f1_HocoMoco\|NFYB_NFYB_f1_HocoMoco | CAGCCAATCAGAG | CTCTGATTGGCTG |
| DMRTA2_1 | GACACTGTAACAAAA | TTTTGTTACAGTGTC |
| FOXA_disc1\|HDAC2_disc2 | TAAGTAAACA | TGTTTACTTA |
| BBX_1 | CACTTCATTGAATTA | TAATTCAATGAAGTG |
| HOXC6_1 | CAAATTAATTAATAAAA | TTTTATTAATTAATTTG |
| ETS_disc4 | AACCGGAAGC | GCTTCCGGTT |
| ALX1_PRRX1_2_SELEX\|ALX1_ISX_2_SELEX\|MSX1_Msx3_2_ | CCAATTAA | TTAATTGG |
| SELEX\|DMBX1_Alx4_1744_PBM\|LHX9_LHX9_1_SELEX\|RA | | |
| X2_RAXL1_1_SELEX\|SHOX_pTH5805_PBM\|MSX1_MSX2_2 | | |
| _SELEX\|DMBX1_Cart1_1275_PBM\|BSX_BSX_1_SELEX\|SHO | | |
| X_Shox2_2641_PBM\|MSX1_MSX1_2_SELEX\|SHOX_PRRX2 | | |
| _1_SELEX\|SHOX_SHOX2_1_SELEX\|ALX1_Vsx1_1_SELEX\|SH | | |
| OX_pTH5666_PBM\|BSX_2\|ISX_3\|LHX9_2\|MSX1_4\|MSX2_ | | |
| 4\|MSX2_6\|PRRX1_3\|PRRX2_4\|RAX2_1\|SHOX2_2\|VSX1_4 | | |
| STAT_known8\|STAT_known9 | TATTTCCA | TGGAAATA |
| MYB_4 | CAACTGCCA | TGGCAGTTG |
| CR936877.3_MA0016.1_SELEX | CCGTGACCCC | GGGGTCACGG |
| RAD21_disc6 | GCCACCCTCTGGTGGCC | GGCCACCAGAGGGTGG |
| | | C |
| ONECUT3_MA0235.1_B1H | AAATCAA | TTGATTT |
| NKX2-1_1 | ACACTTGAGT | ACTCAAGTGT |
| POU2F2_known14 | ATGTATTAATTAAGTA | TACTTAATTAATACAT |
| SCRT1_CG17181_SOLEXA_5_FBgn0035144_B1H | AACCACCTGTTGACC | GGTCAACAGGTGGTT |
| ENSG00000234254_V$TGIF_01_Transfac\|TGIF1_1 | AGCTGTCAGAA | TTCTGACAGCT |
| MITF_TFE3_f1_HocoMoco | CCACATGACC | GGTCATGTGG |
| AR_ECC-1_GR_HudsonAlpha_ChIP-seq | AGGGAACAGAATGTTCT | GCCCAGAACATTCTGTT |
| | GGGC | CCCT |
| TEF_1 | ATGTTAACATAA | TTATGTTAACAT |
| HIC1_HIC2_1_SELEX\|HIC2_1 | ATGCCCACC | GGTGGGCAT |
| IRX5_1 | AATTTTACATGTATATA | TATATACATGTAAAATT |
| ETV5_Gabpa_PBM1ETV5_ELK1_f1_HocoMoco\|ETV5_Ets97 | ACCGGAAGT | ACTTCCGGT |
| D_SANGER_10_FBgn0004510_B1H\|ETV5_Etv5_PBM\|ELK4 | | |
| _1 | | |
| HOXC10_Hoxd9_2_SELEX\|HOXD9_2 | GCAATAAAAA | TTTTTATTGC |
| SIX5_Six4_2860_PBM | ATGATACCC | GGGTATCAT |
| HOXC5_PDX1_1_SELEX\|PDX1_5 | GTAATTAACGGTAATTA | TTAATTACCGTTAATTAC |
| | A | |
| MYC_disc9 | CGCCCACGTC | GACGTGGGCG |
| MYOD1_MA0545.1_ChIP-seq | GAACAGCTGTC | GACAGCTGTTC |
| PITX2_Ptx1_Cell_FBgn0020912_B1H\|DMBX1_Gsc_SOLEXA | GGATTAA | TTAATCC |
| _FBgn0010323_B1H\|PITX2_MA0201.1_B1H\|OTX2_Oc_Cell | | |
| FBgn0004102_B1H | | |
| FOXD1_pTH2673_PBM\|FOXD1_pTH3796_PBM\|FOXD1_pT | TATGTAAACA | TGTTTACATA |
| H2808_PBM | | |
| GZF1_1 | TATAGACGCGCA | TGCGCGTCTATA |
| NFY_known5 | CCTTAGCCAATCA | TGATTGGCTAAGG |
| ZBTB14_3 | TCAGGCGCGCGCGCCA | TGGCGCGCGCGCCTGA |
| HOXC10_HXA9_f1_HocoMoco | TCATAAAACTGTCA | TGACAGTTTTATGA |
| TCF7L2_TCF7_f1_HocoMoco | AGAACAAAGCGC | GCGCTTTGTTCT |
| CREB3L1_CREB3_1_SELEX | CGGTGACGTCATCA | TGATGACGTCACCG |
| DMRT1_pTH9446_PBM | TGTATCAA | TTGATACA |
| LBX2_Lbe_Cell_FBgn0011278_B1H | GTTAACTA | TAGTTAAC |
| POU2F2_known8 | CTCATTTGCATAC | GTATGCAAATGAG |
| ZSCAN26_1 | TTATGTACTAATAA | TTATTAGTACATAA |
| MTF1_Mtf1_2377_PBM | CGTGCGCAA | TTGCGCACG |
| POU3F3_POU3F3_2_SELEX\|POU3F3_3 | ATGCATAAATTA | TAATTTATGCAT |
| MZF1_MA0057.1_SELEX\|MZF1_4 | GGAGGGGGAA | TTCCCCCTCC |
| BHLHE40_MA0464.1_ChIP-seq | CTCACGTGCAC | GTGCACGTGAG |
| NHLH2_HEN1_si_HocoMoco | AGGGACGCAGCTGCTCC | TGGGGAGCAGCTGCGT |
| | CCA | CCCT |
| LHX8_Lhx6_2272_PBM | CTAATCAA | TTGATTAG |
| ARID3C_ARI3A_do_HocoMoco | AATTAATCGAAATCAAA | TTTAATTTGATTTCGATT |
| | TTAAA | AATT |
| JDP2_1 | ACGATGACGTCATCGG | CCGATGACGTCATCGT |
| MAX_HeLa-S3_MAX_Stanford_ChIP- | AGCACGTGGCC | GGCCACGTGCT |
| seq\|MYC_NB4_CMYC_Stanford_ChIP-seq | | |
| TEAD2_1 | CCGCCGC | GCGGCGG |
| YY2_YY2_2_SELEX\|YY2_2 | AAAATGGCGGT | ACCGCCATTTT |
| AHR_tgo_ss_SANGER_5_FBgn0003513_B1H\|ARNT2_tgo_s | GTCACGCA | TGCGTGAC |
| s_SANGER_5_FBgn0015014_B1H | | |
| LHX8_LHX6_3_SELEX\|LHX6_5 | TGATTGCAATCA | TGATTGCAATCA |
| EMX2_MA0219.1_B1H\|HOXC5_MA0166.1_B1H\|MEOX2_ | TCATTAA | TTAATGA |
| MA0215.1_B1H\|BSX_Bsh_SOLEXA_FBgn0000529_B1H\|HO | | |
| XC5_MA0203.1_B1H\|HOXC5_MA0225.1_B1H\|HOXC5_Scr | | |
| SOLEXA_FBgn0003339_B1H\|HOXC5_Hoxc5_2630_PBM\| | | |
| HOXC5_MA0186.1_B1H | | |
| TCF12_disc6 | ATTCCAGGC | GCCTGGAAT |
| VDR_1 | GGGTCAAGGGGGTGA | TCACCCCCTTGACCC |
| RAD21_disc5 | CGCTGCCCTCTGC | GCAGAGGGCAGCG |
| TP73_GSE15704_TP73_rapamycin_ChIP- | ACATGCCCAGACATG | CATGTCTGGGCATGT |
| seq\|TP53_MA0106.2_ChIP-seq | | |
| YY1_known5 | AAAATGGCGGC | GCCGCCATTTT |
| NFIA_NFIA_1_SELEX\|NFIA_NFIX_LSELEX\|NFIA_1\|NFIX_1 | TTGGCACCGTGCCAA | TTGGCACGGTGCCAA |
| MEF2B_V$RSRFC4_01_Transfac | AAGCTATAAATAGAAT | ATTCTATTTATAGCTT |
| NANOG_disc4 | TGCATATCAA | TTGATATGCA |
| EVX2_eve_FlyReg_FBgn0000606_B1H | AAATAATTAACG | CGTTAATTATTT |
| HOXD8_1 | TAATTAATTAATGGCTA | TAGCCATTAATTAATTA |
| GTF2A_1 | GGTCCTTTTATA | TATAAAAGGACC |
| JUN_MA0492.1_ChIP-seq | AAAGATGATGTCATC | GATGACATCATCTTT |
| ETV5_H1-hESC_GABP_HudsonAlpha_ChIP-seq | AACCGGAAGTG | CACTTCCGGTT |
| GATA2_Mw145_ChIP-seq | TCTTATCA | TGATAAGA |
| ARNT2_ss_tgo_SANGER_10_FBgn0015014_B1H\|AHR_ss_t | CATTGCGTGAC | GTCACGCAATG |
| go_SANGER_10_FBgn0003513_B1H | | |
| NFE2L1:: MAFG_1 | CATAATTGCTGAGTCAT | CTAAAATGACTCAGCAA |
| | TTTAG | TTATG |
| MEF2_known6 | CGGTTTAAAAATAACCC | TGGGTTATTTTTAAACC |
| | A | G |
| ELF1_I$E74A_01_Transfac | CCTCACTTCCGGGTTCG | CGAACCCGGAAGTGAG |
| | | G |
| NKX2-5_Titf1_1722_PBM | CCACTTAA | TTAAGTGG |
| EBF1_known3 | ACCCAAGGGA | TCCCTTGGGT |
| POU3F3_V$OCT1_01_Transfac | CCGAAATTTGCATATTG | TTCAATATGCAAATTTC |
| | AA | GG |
| RARG_RARB_a_HocoMoco | GAGGTCAGGGC | GCCCTGACCTC |
| SP4_1 | GAGAAGGGGGCGGGAC | GGTCCCGCCCCCTTCTC |
| | C | |
| PPARA_2 | CCTGACCCCAATGACCC | TCGGGTCATTGGGGTCA |
| | GA | GG |
| HOXB4_1 | CGCGTTAATTAATTACC | GGTAATTAATTAACGCG |
| TCF4_TCF4_2_SELEX\|TCF4_2 | CACACCTGCA | TGCAGGTGTG |
| MYOD1_V$MYOD_Q6_Transfac | AGCACCTGTC | GACAGGTGCT |
| PHOX2B_1 | CCTATTAATTAATTCCG | CGGAATTAATTAATAGG |
| MEIS1_2 | AAGGAGCTGTCAATAC | GTATTGACAGCTCCTT |
| ETV5_ETV2_1_SELEX\|ETV2_1 | AACCGGAAATA | TATTTCCGGTT |
| FOXM 1_FOXM1_f1_HocoMoco | AAAAACAAACAAC | GTTGTTTGTTTTT |
| HNF4G_Mv82_ChIP-seq | AGTCCA | TGGACT |
| BHLHA15_pTH4582_PBM | ACATATGG | CCATATGT |
| EBF1_V$OLF1_01_Transfac\|EBF1_known1 | ACAACCTCCCTGGGGAG | CACAACTCCCCAGGGAG |
| | TTGTG | GTTGT |
| DMBX1_DMBX1_1_SELEX\|DMBX1_2 | GCGGATTAAC | GTTAATCCGC |
| LBX2_LBX2_2_SELEX\|HESX1_HESX1_1_SELEX\|NKX1- | GCCAATTAGC | GCTAATTGGC |
| 1_Nkx1-1_3856_PBM\|HESX1_1\|LBX2_3 | | |
| REST_disc9 | GCACCTCGCACAGC | GCTGTGCGAGGTGC |
| YY2_YY1_1_SELEX\|YY1_known7 | ATAATGGCGGC | GCCGCCATTAT |
| MECP2_M ECP2_f1_HocoMoco | CCCGGAG | CTCCGGG |
| MAFK_Mafk_3106_PBM | ATTTTGCTGA | TCAGCAAAAT |
| TAL1_disc2 | AGATAAGAG | CTCTTATCT |
| TWIST2_TWST1_f1_HocoMoco | ACCCAGGTGG | CCACCTGGGT |
| YY1_known1 | GAACACCATTTTTGAAC | GTTCAAAAATGGTGTTC |
| NR2E3_MA0164.1_SELEX\|NR2E3_1 | AAGCTTG | CAAGCTT |
| EOMES_TBR1_2_SELEX\|TBX3_TBX2_2_SELEX\|TBR1_2\|TBX | AAGGTGTGAAA | TTTCACACCTT |
| 2_2 | | |
| LHX6_2 | AACCGCTAATTAGTGGA | TCCACTAATTAGCGGTT |
| ASCL2_Ascl2_1_SELEX\|ASCL2_2 | AGCAGCTGCT | AGCAGCTGCT |
| MYB_3 | AGGGCCAGTTG | CAACTGGCCCT |
| GATA2_Gata5_3768_PBM | AGAGATAAG | CTTATCTCT |
| AP1_known9 | ATGACTCA | TGAGTCAT |
| SP9_SP1_f2_HocoMoco | CCGGCCCCGCCCCCTCC | GGGGAGGGGGCGGGG |
| | CC | CCGG |
| RARG_RARA_4_SELEX\|RARA_5 | AGGGTCAAAAGGTCA | TGACCTTTTGACCCT |
| ZFHX2_pTH5642_PBM\|NOTO_pTH6268_PBM | GTTAATTAAC | GTTAATTAAC |
| UBP1_SRP000217_Tcfc2pl1_ChIP- | CCGGTTCAAACCGGTTC | GCCAGAACCGGTTTGAA |
| seq\|UBP1_SRP000217_Tcfcp2l1_ChIP-seq | TGGC | CCGG |
| ESRRG_ESRRG_1_SELEX\|ESRRG_1 | AAGGTCATTTCAAGGTC | TGACCTTGAAATGACCT |
| | A | T |
| CDX2_Cdx1_2245_PBM | GGTAATAAA | TTTATTACC |
| FOXO6_V$FOXO1_02_Transfac | AACGTAAACAACAC | GTGTTGTTTACGTT |
| MAFK_MAFG_si_HocoMoco | AGTCATG | CATGACT |
| MAZ_MAZ_f1_HocoMoco | CCCTCCCTCCCCCCCCC | GGGGGGGGGAGGGAG |
| | | GG |
| TCF3_2 | AATAACAGGTGTTCAC | GTGAACACCTGTTATT |
| FOXO6_FOXO6_3_SELEX\|FOXO6_3 | GTCGTGTGGGGAAA | TTTCCCCACACGAC |
| ESRRG_ESRRG_2_SELEX\|ESRRG_2 | AAGGTCAGTCAAGGTCA | TGACCTTGACTGACCTT |
| SIN3A_disc2 | GGCCACGTGA | TCACGTGGCC |
| SOX7_SOX7_3_SELEX\|SOX7_4 | CATGACTGAAATTCATC | GATGAATTTCAGTCATG |
| TBPL2_MA0386.1_PBM\|TBPL2_YER148W_798_DeBoer11 | ATCGAATATATATATCT | GACTAGATATATATATT |
| | AGTC | CGAT |
| HOXC5_V$HOX13_01_Transfac | TGCCAACTTCCCCATTA | TGGAGGCGACCACTAAT |
| | GTGGTCGCCTCCA | GGGGAAGTTGGCA |
| EMX2_1 | ACCACTAATTAGTGGAC | GTCCACTAATTAGTGGT |
| ATF3_Mv43_ChIP-seq\|TCF7L2_disc1 | ATGAGTCATC | GATGACTCAT |
| NR1H4_3 | AGGGTTAATAAA | TTTATTAACCCT |
| RAD21_disc4 | ACCTGGTGGC | GCCACCAGGT |
| CBFB_PEBB_f1_HocoMoco | CAAACCACAGA | TCTGTGGTTTG |
| STAT_disc5 | AAATTCCTG | CAGGAATTT |
| HNF4G_VSHNF4_01_B_Transfac | GGGGTCAAAGGTCAC | GTGACCTTTGACCCC |
| NKX2-5_MA0503.1_ChIP-seq | AGCCACTCAAG | CTTGAGTGGCT |
| TFCP2_VSCP2_01_Transfac | CTGGGTAGAGC | GCTCTACCCAG |
| GRHIA_GRHL1_2_SELEX\|TFCP2_TFCP2_1_SELEX\|GRHL1_2 | AAACCGGTTT | AAACCGGTTT |
| \|TFCP2_4 | | |
| NANOGP1_NANOG_f1_HocoMoco | CCATTAAA | TTTAATGG |
| NKX2-5_Nkx2-5_3436_PBM | GCCACTTAAA | TTTAAGTGGC |
| NKX2-5_NKX32_f1_HocoMoco | AGTTAAGTGGA | TCCACTTAACT |
| PAX4_5 | GAAAAATTTCCAATACT | GGGGGGGGAGTGGAGT |
| | CCACTCCCCCCCC | ATTGGAAATTTTTC |
| NR2F2_NR2F1_4_SELEX\|HNF4_known26 | CAAAGGTCAAGGG | CCCTTGACCTTTG |
| HNF1_1 | GGTTAATAATTACCA | TGGTAATTATTAACC |
| THRB_THB_f1_HocoMoco | GGTCAGGTCA | TGACCTGACC |
| IRF8_IRF8_1_SELEX\|RF_known19 | ACGAAACCGAAACT | AGTTTCGGTTTCGT |
| ONECUT3_ONECUT3_1_SELEX\|ONECUT3_1 | AAAAAATCAATAAT | ATTATTGATTTTTT |
| GLIS3_Imd_SANGER_5_FBgn0039039_B1H | ACGACCCCCCACAG | CTGTGGGGGGTCGT |
| E4F1_E4F1_f1_HocoMoco | CGTGACGTC | GACGTCACG |
| SOX10_1 | CTTTGTC | GACAAAG |
| ETV5_ETS2_f1_HocoMoco | CCACTTCCCGC | GCGGGAAGTGG |
| CHD2_disc2\|E2F_disc5 | AAAGGCGC | GCGCCTTT |
| LHX5_1 | AGTATTTAATTAATTCG | CGAATTAATTAAATACT |
| NR1H4_2 | AGGTCATTAACCC | GGGTTAATGACCT |
| YY1_known3 | AGATGGCCG | CGGCCATCT |
| ETV5_K562_GABP_HudsonAlpha_ChIP-seq | CACTTCCGGTTCC | GGAACCGGAAGTG |
| CUX1_V$CDP_01_Transfac\|CUX1_1 | ATCGATTATTGG | CCAATAATCGAT |
| PLAGL1_Plagl1_0972_PBM | GGGGCCCCCC | GGGGGGCCCC |
| HOXC10_Hoxa11_1_SELEX\|HOXA11_2 | AATTTTACGACC | GGTCGTAAAATT |
| SMAD1_Mad_FlyReg_FBgn0011648_B1H | CGGCCGACGC | GCGTCGGCCG |
| CTCF_HCPEpiC_CTCF_UW_ChIP- | CGCCCCCTGGTGGC | GCCACCAGGGGGCG |
| seq\|CTCF_HepG2_CTCF_UW_ChIP-seq | | |
| IRX3_Ara_Cell_FBgn0015904_B1H | AAATAACA | TGTTATTT |
| FOXO6_pTH3731_PBM\|FOXO6_pTH3477_PBM | TCGTAAACAA | TTGTTTACGA |
| GFI1B_GFI1_f1_HocoMoco | AAATCACAGC | GCTGTGATTT |
| PKNOX2_MEIS2_1_SELEX\|MEIS2_1 | TTGACAGCTGTCAA | TTGACAGCTGTCAA |
| RFX8_MA0510.1_ChIP-seq | CTCCCTGGCAACAGC | GCTGTTGCCAGGGAG |
| NRF1_NRF1_1_SELEX\|NRF1_known2 | TGCGCATGCGCA | TGCGCATGCGCA |
| PLAGL1_PLAL1_si_HocoMoco | CGGGGGGCCC | GGGCCCCCCG |
| IRF3_IRF3_1_SELEX\|IRF_known14 | CAGTTTCGGTTTCCGTTT | GGGAAACGGAAACCGA |
| | CCC | AACTG |
| AL662830.5_MA0070.1_SELEX\|PBX1_4 | CCATCAATCAAA | TTTGATTGATGG |
| IRF_known9 | GAAAGCGAAACC | GGTTTCGCTTTC |
| SETDB1_disc1 | CGGGGCATTCTGGGAAT | GGACTACAATTCCCAGA |
| | TGTAGTCC | ATGCCCCG |
| GLIS3_Imd_SOLEXA_5_FBgn0039039_B1H | CAGACCCCCCACAGA | TCTGTGGGGGGTCTG |
| PRDM1_Mv112_ChIP-seq | AAAGTGATA | TATCACTTT |
| LHX9_LHX9_2_SELEX\|LHX9_3 | TAATTGCCAATTA | TAATTGGCAATTA |
| HNF4G_HNF4A_f1_HocoMoco | AGGCCAAAGTCCA | TGGACTTTGGCCT |
| TP53_V$P53_02_Transfac\|TP53_2 | AGACATGCCT | AGGCATGTCT |
| POU6F2_V$POU6F1_01_Transfac\|POU6F1_1 | ATAAATTATGC | GCATAATTTAT |
| GATA2_V$GATA3_01_Transfac\|GATA_known3 | CCCTATCTC | GAGATAGGG |
| ESRRG_MA0592.1_ChIP-seq | CCAAGGTCACA | TGTGACCTTGG |
| HMGN3_disc1 | CGCTGACTCA | TGAGTCAGCG |
| RXRA_known9 | ATTAAGGGGTCACGACA | TGTCGTGACCCCTTAAT |
| AP1_disc9 | ACTCATGC | GCATGAGT |
| NFIL3_NFIL3_si_HocoMoco | ATGCATTACATAAC | GTTATGTAATGCAT |
| SOX17_SOX17_f2_HocoMoco | CAACAATCTTCATTGTCC | GGACAATGAAGATTGTT |
| | | G |
| SRF_SRF_1_SELEX\|SRF_known9 | ACCATATATGGC | GCCATATATGGT |
| MYBL1_MYBL1_2_SELEX\|MYBL1_3 | ACCGTTAACGGT | ACCGTTAACGGT |
| TFE_1 | TCACATGA | TCATGTGA |
| SREBF2_pTH5161_PBM | ATCACGCGA | TCGCGTGAT |
| PAX3_V$PAX3_01_Transfac\|PAX3_2 | TCGTCACGCTTCA | TGAAGCGTGACGA |
| PRDM16_MA0029.1_SELEX\|RUNX1_8 | AAGATAAGATAACA | TGTTATCTTATCTT |
| NFE2_disc1 | ATGACTCAGC | GCTGAGTCAT |
| SRF_pTH10822_PBM | CATATAAGG | CCTTATATG |
| RBPJ_SUH_f1_HocoMoco | CGTGGGAAA | TTTCCCACG |
| MSX1_MSX2_f1_HocoMoco | ACAATTA | TAATTGT |
| MAFK_MAFG_1_SELEX\|MAFG_1 | AAATTGCTGAGTCAGCA | AATATGCTGACTCAGCA |
| | TATT | ATT |
| FOXD1_V$FOXJ2_02_Transfac\|FOXJ2_2 | AAAAATATTATTAT | ATAATAATATTTTT |
| RUNX1_RUNX1_f1_HocoMoco | TAACCACAAA | TTTGTGGTTA |
| ETS1_V$CETS1P54_02_Transfac | CCACCGGAAATTA | TAATTTCCGGTGG |
| RFX5_known3 | AGTTACTAGGCAAA | TTTGCCTAGTAACT |
| HOXC5_MA0256.1_B1H\|EVX2_MA0221.1_B1H | CTAATGA | TCATTAG |
| ESRRG_ESRRA_3_SELEX\|ESRRG_ESRRA_6_SELEX\|ESRRA_k | CAAGGTCATTTCAAGGT | TGACCTTGAAATGACCT |
| nown9 | CA | TG |
| TFAP2A_TFAP2C_1_SELEX\|TFAP2A_TFAP2C_4_SELEX\|TFA | TGCCCCAGGGCA | TGCCCTGGGGCA |
| P2A_TFAP26_1_SELEX\|TFAP26_21TFAP2_known14\|TFAP2 | | |
| _known17 | | |
| SOX15_SOX15_3_SELEX\|SOX1_SOX2_2_SELEX\|SOX1_SOX1 | ATGAATAACATTCAT | ATGAATGTTATTCAT |
| 4_2_SELEX\|SOX1_SOX2_6_SELEX\|SOX1_Sox1_2_SELEX\|SO | | |
| X14_3\|SOX15_4\|SOX2_3\|SOX2_7\|SOX1_3 | | |
| POU3F3_pTH9290_PBM | AATTTGCATA | TATGCAAATT |
| MLX_Mio_bigmax_SANGER_5_FBgn0039509_B1H | ATCACGTG | CACGTGAT |
| CDX2_Cad_Cell_FBgn0000251_B1H\|HOXB13_pTH6143_PB | TAATAAAA | TTTTATTA |
| M\|CDX2_Cad_SOLEXA_FBgn0000251_B1H | | |
| INSM1_MA0155.1_COMPILED\|INSM1_1 | CGCCCCCTGACA | TGTCAGGGGGCG |
| MYBL1_Myb_1047_PBM | TAACGGTCAA | TTGACCGTTA |
| ARNT2_ARNT2_si_HocoMoco | GCCTCCCACGCC | GGCGTGGGAGGC |
| GATA2_V$GATA3_03_Transfac | AAAGATCTTA | TAAGATCTTT |
| CEBPA_HepG2_CEBPB_Stanford_ChIP-seq | ATTGTGCAATC | GATTGCACAAT |
| YY2_MA0095.2_ChIP-seq\|YY2_TYY1 J2_HocoMoco | CAAGATGGCGGC | GCCGCCATCTTG |
| CEBPA_MA0466.1_ChIP-seq | ATTGTGCAATA | TATTGCACAAT |
| ZBTB7A_known2 | AAGCCCCCCAAAAAT | ATTTTTGGGGGGCTT |
| MEF2B_V$MEF2_03_Transfac\|MEF2_known4 | TGTGGTTCTAAAAATAG | TTGTTCTATTTTTAGAAC |
| | AACAA | CACA |
| EGR1_known4 | CCCGCCCCCGCCCC | GGGGCGGGGGCGGG |
| GATA1_GATAe_SANGER_5_FBgn0038391_B1H | CTTATCA | TGATAAG |
| PAX2_PAX2_f1_HocoMoco | GTTCAGTCATGCGTGAC | TGTCACGCATGACTGAA |
| | A | C |
| PAX4_6 | GTGGGCTAATTAGTTCA | TGAACTAATTAGCCCAC |
| ARNT2_tgo_cyc_SANGER_5_FBgn0023094_B1H\|BHLHE40 | GTCACGTGA | TCACGTGAC |
| _Bhlhb2_1274_PBM\|ARNT2_tgo_cyc_SANGER_5_FBgn001 | | |
| 5014_B1H | | |
| EN2_EN1_2_SELEX\|EN1_5 | TAATTGACCAATTA | TAATTGGTCAATTA |
| NR5A2_1 | CTGACCTTGAAC | GTTCAAGGTCAG |
| YY2_YY2_3_SELEX | ATGGCGGCATGG | CCATGCCGCCAT |
| MAFK_MAFK_3_SELEX\|MAF_known8 | AAAATTGCTGAC | GTCAGCAATTTT |
| ZBTB42_ZNF238_1_SELEX\|ZBTB18_2 | AATCCAGATGTTG | CAACATCTGGATT |
| TA L2_TAL1_f1_Hoco Moco | GAACAGATGGTC | GACCATCTGTTC |
| CPEB1_CPEB1_1_SELEX\|CPEB1_1 | AATAAAAA | TTTTTATT |
| TCF7L2_pan_FlyReg_FBgn0085432_B1H\|TCF7L1_Tcf3_378 | CTTTGATC | GATCAAAG |
| 7_PBM | | |
| ETS_known6 | ACCGGAAGTGCA | TGCACTTCCGGT |
| TCF7L1_MA0523.1_ChIP-seq | AAAGATCAAAGGAA | TTCCTTTGATCTTT |
| ETV5_ETV5_f1_HocoMoco | GACAGGAAGTAAC | GTTACTTCCTGTC |
| ETV5_ERG_f1_HocoMoco | ACCGGAAATCC | GGATTTCCGGT |
| MZFl_MZF1_f1_HocoMoco | GGTGGGGAA | TTCCCCACC |
| RUNX_2 | ACGTTTGTGGTTAGC | GCTAACCACAAACGT |
| PBX1_5 | TCACCCATCAATAATCA | TGATTATTGATGGGTGA |
| EGR3_EGR4_f1_HocoMoco | GCCCTGCCGCC | GGCGGCAGGGC |
| POU3F3_POU3F2_1_SELEX\|POU3F2_5 | TAATTTATGCATA | TATGCATAAATTA |
| LHX2_1 | GTTCACTAATTAGTTTA | TAAACTAATTAGTGAAC |
| MYOD1_V$MYOD_01_Transfac | CAACACCTGTCC | GGACAGGTGTTG |
| GATA2_Mv73_ChIP-seq | CTGGTGGGGGCAGATA | TCCTTATCTGCCCCCACC |
| | AGGA | AG |
| TCF4_GM12878_TCF12_HudsonAlpha_ChIP-seq | ACAGCTGCTGC | GCAGCAGCTGT |
| TCF7L2_known4 | CATCAAAGGG | CCCTTTGATG |
| HNF4_known8 | AAAGTCCAA | TTGGACTTT |
| FOXO6_N$DAF16_01_Transfac | GTGTTGTTTACAAC | GTTGTAAACAACAC |
| HMBOX1_1 | GAAAACTAGTTAACATC | GATGTTAACTAGTTTTC |
| CTCF_NHEK_CTCF_UW_ChIP-seq | CCACCAGGGGGCGC | GCGCCCCCTGGTGG |
| ALX1_2 | CGAATTAATTAATCACC | GGTGATTAATTAATTCG |
| ELF1_MA0473.1_ChIP-seq | CACTTCCTGGTTC | GAACCAGGAAGTG |
| EOMES_TBX21_1_SELEX\|TBX21_1 | GGTGTGAATTCACACC | GGTGTGAATTCACACC |
| AL662828.6_V$ATF6_01_Transfac\|ATF6_1 | CCACGTCA | TGACGTGG |
| ATF3_pTH2684_PBM | ACGTCATCA | TGATGACGT |
| E2F_known22 | GCGCCAAA | TTTGGCGC |
| POU5F1_known1 | ATTGTCATGCTAATG | CATTAGCATGACAAT |
| ELF1_GM12878_ELF1_HudsonAlpha_ChIP-seq | CCACTTCCGGGTTCG | CGAACCCGGAAGTGG |
| MAF_known4 | AAATTTGCTGACTTAGC | GCTAAGTCAGCAAATTT |
| HEY1_disc2 | GCCCCGCTGCCGCCGC | GCGGCGGCAGCGGGGC |
| FOXD1_HepG2_FOXA2_HudsonAlpha_ChIP-seq | CTCTGTTTACTTTGC | GCAAAGTAAACAGAG |
| HNF1A_MA0046.1_COMPILED | GGTAATTATTAACC | GGTTAATAATTACC |
| HMGA2_HMGA1J1_HocoMoco | AAAATAC | GTATTTT |
| SOX18_SOX18_f1_HocoMoco | GAACCCATTGTTCTTTTC | GGAAAAGAACAATGGG |
| | C | TTC |
| SRF_known6 | ATGGCCATATAAGGAG | CATCTCCTTATATGGCCA |
| | ATG | T |
| TGIF2LY_TGIF2LX_1_SELEX\|ENSG00000234254_TGIF1_1_S | TGACAGCTGTCA | TGACAGCTGTCA |
| ELEX\|ENSG00000234254_TGIF2_1_SELEX\|TGIF1_3\|TGIF2L | | |
| X_1\|TGIF2_2 | | |
| GFI1B_sens_SANGER_10_FBgn0002573_B1H | AAATCACGGC | GCCGTGATTT |
| SIX5_Mv123_ChIP-seq\|ETS_disc5 | ACAACTCC | GGAGTTGT |
| RFX8_H1-hESC_RFX5_Stanford_ChIP-seq | TCACCTGTTGCTAGGCA | TCTGCCTAGCAACAGGT |
| | GA | GA |
| GBX2_GBX1_1_SELEX\|HOXA4_Hoxa2_1_SELEX\|HOXC5_H | ACTAATTAGC | GCTAATTAGT |
| OXB3_1_SELEX\|LHX8_LHX6_1_SELEX\|GBX1_2\|HOXB3_2\| | | |
| HOXA2_3\|LHX6_3 | | |
| EGR3_V$EGR2_01_Transfac\|EGR1_known2 | ACGCCCACGCAA | TTGCGTGGGCGT |
| ZBTB4_ZBTB4!METH_f1_HocoMoco | CAATAGCGGTGGTGG | CCACCACCGCTATTG |
| SP1_known6\|SP1_known7 | CCCCGCCCCC | GGGGGCGGGG |
| EGR3_V$EGR3_01_Transfac\|EGR3_V$EGR1_01_Transfac\| | ACGCCCACGCAT | ATGCGTGGGCGT |
| EGR1_known1\|EGR3_1 | | |
| SP5_pTH9394_PBM | ACACGCCCCT | AGGGGCGTGT |
| HOXD12_Hoxc12_3480_PBM\|HOXD12_Hoxd12_3481_PB | GGTCATAAAA | TTTTATGACC |
| M\|HOXC10_Hoxb9_3413_PBM\|HOXC10_Hoxc11_3718_P | | |
| BM | | |
| RAD21_disc1 | GGCCACCAGATGGCACT | TATAGTGCCATCTGGTG |
| | ATA | GCC |
| HHEX_pTH6423_PBM | GGGCAATAGA | TCTATTGCCC |
| PPARA_V$PPARA_01_Transfac\|PPARA_1 | CAAAACTAGGTCAAAG | TGACCTTTGACCTAGTTT |
| | GTCA | TG |
| GLI1_GLI1_f1_HocoMoco | AGACCACCCAG | CTGGGTGGTCT |
| SMAD2_SMAD3_f1_HocoMoco | GGCCAGACAC | GTGTCTGGCC |
| GLI1_GLI2_f1_HocoMoco\|GLI1_Ci_SANGER_5_FBgn00048 | AGACCACCCAC | GTGGGTGGTCT |
| 59_81H | | |
| SPIC_MA0080.3_ChIP-seq\|SPIC_GSE11329_Sfpi1_ChIP-seq | AAAAAGAGGAAGTGA | TCACTTCCTCTTTTT |
| FOXD1_MA0040.1_SELEX\|FOXQ1_2 | AATAAACAATA | TATTGTTTATT |
| HEY1_pTH5102_PBM\|NPAS2_tai_Clk_SANGER_5_FBgn002 | GACACGTGC | GCACGTGTC |
| 3076_B1H | | |
| USF1_pTH4376_PBM | CCCACGTGATA | TATCACGTGGG |
| CBX5_1 | AATATTCAACAG | CTGTTGAATATT |
| TFAP2A_TFAP2A_5_SELEX | TGCCCTAGGGCA | TGCCCTAGGGCA |
| NFYC_NFYC_f1_HocoMoco | CAGCCAATCAGCGC | GCGCTGATTGGCTG |
| FOXD1_MA0033.1_SELEX\|FOXL1_2 | TATACATA | TATGTATA |
| ETV5_GM12878_GABP_HudsonAlpha_ChIP-seq | CACTTCCGGCG | CGCCGGAAGTG |
| RARG_RARG_5_SELEX\|RARG_5 | AAGGTCAAGCAAAGGT | TGACCTTTGCTTGACCTT |
| | CA | |
| HOXC5_Abd- | TCAATTAA | TTAATTGA |
| A_FlyReg_FBgn0000014_81H\|HOXC5_HXD4_f1_HocoMoc | | |
| o | | |
| FOXD1_FOXI1_f1_HocoMoco | AACCAATCAGAG | CTCTGATTGGTT |
| ETV5_ELK1_3_SELEX\|ETS_known13 | CACTTCCGCCGGAAGTG | CACTTCCGGCGGAAGTG |
| SPIC_SPIB_f1_HocoMoco | AAAAAGAGGAAG | CTTCCTCTTTTT |
| POU4F1_POU4F2_1_SELEX\|POU4F1_POU4F3_1_SELEX\|PO | ATGCATAATTAATGAG | CTCATTAATTATGCAT |
| U4F1_POU4F2_2_SELEX\|POU4F2_1\|POU4F2_2\|POU4F3_2 | | |
| HDX_Hdx_3845_PBM | GAAATCA | TGATTTC |
| GCM1_pTH9341_PBM\|GCM1_pTH9357_PBM\|GCM1_GC | TACCCGCATA | TATGCGGGTA |
| M2_1_SELEX\|GCM2_1 | | |
| MSX2_1 | AGCGCTAATTGGTCTTC | GAAGACCAATTAGCGCT |
| STAT5B_STA5A_do_HocoMoco | AATTCCTGGAAA | TTTCCAGGAATT |
| PKNOX2_MEIS2_2_SELEX\|MEIS2_2 | GCTGTCAA | TTGACAGC |
| AL662830.5_V$PBX1_02_Transfac\|PBX1_2 | AATTTGATTGATGTG | CACATCAATCAAATT |
| LHX8_Lhx8_1_SELEX\|LHX8_2 | CTAATTAGCGCTAATTA | TTAATTAGCGCTAATTA |
| | A | G |
| RFX8_RFX1_4537_PBM | GTAGCAACCA | TGGTTGCTAC |
| BCL6B_BCL66_1_SELEX\|BCL6B_2 | TGAATTCCTAGAAAGCA | TGCTTTCTAGGAATTCA |
| JUN_HepG2_CJUN_Stanford_ChIP-seq | GAGGATGACGTCATC | GATGACGTCATCCTC |
| ATOH7_MA0461.1_ChIP-seq | CAGATGGC | GCCATCTG |
| MYBL1_MYBL1_1_SELEX\|MYBL1_2 | ACCGTTAAACGG | CCGTTTAACGGT |
| TLX3_TLX1_f1_HocoMoco | CGCCAAGGAGC | GCTCCTTGGCG |
| ETS_known5 | AATTACTTCCTGTC | GACAGGAAGTAATT |
| STAT_disc4 | ATTGCACAA | TTGTGCAAT |
| RARG_Rara_2_SELEX\|RARA_9 | AGGTCACTCAAAGGTCA | TGACCTTTGAGTGACCT |
| XBP1_XBP1_f1_HocoMoco | GACGTGTCATTA | TAATGACACGTC |
| ESRRB_1 | AGCTCAAGGTCA | TGACCTTGAGCT |
| MYOD1_MA0499.1_ChIP-seq | AGGGACAGCTGCA | TGCAGCTGTCCCT |
| CEBPA_K562_CEBPB_Stanford_ChIP-seq | GATTGTGCAATACC | GGTATTGCACAATC |
| MAFB_Mafb_3_SELEX\|MAF_known12 | AATGCTTACGTCAGCAC | AGTGCTGACGTAAGCAT |
| | T | T |
| NPAS2_Met_Clk_SANGER_5_FBgn0023076_B1H | CACGTGTC | GACACGTG |
| HOXC10_HOXA10_2_SELEX\|HOXA10_3 | GGTAATAAAAA | TTTTTATTACC |
| ONECUT3_ONECUT1_1_SELEX\|ONECUT3_ONECUT1_2_SEL | AAAAAATCGATAAT | ATTATCGATTTTTT |
| EX\|ONECUT3_ONECUT2_1_SELEX\|ONECUT1_2\|ONECUT1 | | |
| _3\|PNECUT2_1 | | |
| EBF1_known2 | GTCCCTTGGGA | TCCCAAGGGAC |
| TERF2_pTH7805_PBM | CTAGGGTTA | TAACCCTAG |
| PAX5_known3 | CTGGAACTCAC | GTGAGTTCCAG |
| SOX1_SOX14_1_SELEX\|SOX14_2 | ACAATAACATTG | CAATGTTATTGT |
| SRF_known4 | CCCATATAAGGAGATGG | GCCATCTCCTTATATGG |
| | C | G |
| CTCF_HEEpiC_CTCF_UW_ChIP-seq | CCACCAGAGGGCG | CGCCCTCTGGTGG |
| CTCF_HeLa-53_CTCF_Broad_ChIP- | AGCGCCCCCTGGTGG | CCACCAGGGGGCGCT |
| seq\|CTCF_SRP000217_Ctcf_ChIP- | | |
| seq\|CTCF_NHLF_CTCF_Broad_ChIP- | | |
| seq\|CTCF_HPAF_CTCF_UW_ChIP- | | |
| seq\|CTCF_HepG2_CTCF_HudsonAlpha_ChIP-seq | | |
| PAX7_1 | CGAACTAATTAGTACTA | TAGTACTAATTAGTTCG |
| NR2E3_Hr51_SANGER_5_FBgn0034012_B1H | AAAAATCAAAGGT | ACCTTTGATTTTT |
| CR936877.3_RXRG_4_SELEX\|CR936877.3_RXRA_2_SELEX\| | GGGGTCATGACCCC | GGGGTCATGACCCC |
| RXRA_known11 | | |
| DUXA_DUXA_1_SELEX\|DUXA_1 | CTAATTTAATCAA | TTGATTAAATTAG |
| ESR2_MA0112.2_ChIP-seq\|ESRRA_known4 | AGGTCAGGGTGACCTG | GGCCCAGGTCACCCTGA |
| | GGCC | CCT |
| SPDEF_SPDEF_3_SELEX\|SPDEF_4 | GCAGTAAGAAGTATAC | GTATACTTCTTACTGC |
| YY2_K562b_YY1_UCD_ChIP-seq | CAAGATGGCGGCGGC | GCCGCCGCCATCTTG |
| ZIC1_2 | CACCCCCGGGGGGG | CCCCCCCGGGGGTG |
| ESRRG_ESRRG_3_SELEX\|ESRRG_pTH2311_PBM\|ESRRG_3 | ATGACCTTGA | TCAAGGTCAT |
| SP9_pTH5423_PBM | GAGCGGGA | TCCCGCTC |
| SMARCC1_SMRC1_f1_HocoMoco | CTGAGTCAC | GTGACTCAG |
| ISL2_tup_SOLEXA_10_FBgn0003896_B1H | CTTAATTGA | TCAATTAAG |
| TFAP2A_Tcfap2b_3988_PBM | CCTGAGGCGA | TCGCCTCAGG |
| E2F3_E2F3_si_HocoMoco | CGCGCGAAAC | GTTTCGCGCG |
| TEAD1_MA0090.1_COMPILED\|TEAD1_2 | CACATTCCTCCG | CGGAGGAATGTG |
| ESRRA_known3 | ACCGTGACCTG | CAGGTCACGGT |
| KLF4_CG9895_SOLEXA_5_FBgn0034810_B1H | GGCCACGCCCA | TGGGCGTGGCC |
| RARG_RARB_1_SELEX\|RARG_Rarb_1_SELEX\|RARB_1 | AAAGGTCAAAAGGTCA | TGACCTTTTGACCTTT |
| RARG_pTH4269_PBM\|RARG_pTH2804_PBM | AGAGGTCACC | GGTGACCTCT |
| ZEB1_known5 | CACCTG | CAGGTG |
| NR2C2_pTH1284_PBM | AGAGGTCACG | CGTGACCTCT |
| E2F1_E2F1_f2_HocoMoco\|E2F4_E2F4_do_HocoMoco | AATTGGCGGGAAAA | TTTTCCCGCCAATT |
| MAFK_MAFK_2_SELEX\|MAF_known7 | AAAATGCTGACTCAGCA | AAAATGCTGAGTCAGCA |
| | TTTT | TTTT |
| ENSG00000250096_MA0511.1_ChIP-seq | CAAACCACAAACCCC | GGGGTTTGTGGTTTG |
| EP300_disc8 | CGGCGCCCGC | GCGGGCGCCG |
| ETV5_Ets96B_SANGER_5_FBgn0039225_B1H | ACCGGAAGTAC | GTACTTCCGGT |
| RFX5_disc3 | AACTGATGA | TCATCAGTT |
| HLF_pTH9052_PBM | TATTTACGTAACA | TGTTACGTAAATA |
| FOXD1_fd64A_SANGER_5_FBgn0004895_B1H | TATAAACA | TGTTTATA |
| RFX7_1 | CCGCATAGCAACGGA | TCCGTTGCTATGCGG |
| SEF1_1 | AACACGGATATCTGTGG | GACCACAGATATCCGTG |
| | TC | TT |
| NFIA_NFIX_4_SELEX | CTGGCAAATTGCCAA | TTGGCAATTTGCCAG |
| POU2F2_1\|POU2F3_1 | TCTAATTTGCATACAA | TTGTATGCAAATTAGA |
| REST_PFSK-1_NRSF_HudsonAlpha_ChIP-seq | CAGCACCATGGACAG | CTGTCCATGGTGCTG |
| GRHL1_GRHL1_3_SELEX\|GRHL1_3 | AAAACCGGTTTT | AAAACCGGTTTT |
| NR1H3_EcR_SANGER_5_FBgn0000546_B1H | ATGACCTC | GAGGTCAT |
| SREBP_known3 | CACCCCA | TGGGGTG |
| TBX1_TBX1_5_SELEX\|TBX1_4 | TTCACACCTAGAGGTGT | TTCACACCTCTAGGTGT |
| | GAA | GAA |
| REST_disc10 | AAGGTGCTG | CAGCACCTT |
| SPIC_SP\|1_1_SELEX\|SPIC_SPIB_1_SELEX\|SPIC_Spic_1_SELE | AAAAAGCGGAAGTA | TACTTCCGCTTTTT |
| X\|SPI1_known4\|SPIB_2\|SPIC_2 | | |
| MAX_GM12878_MAX_Stanford_ChIP-seq | CAGTCACGTGGTC | GACCACGTGACTG |
| MYBL2_pTH3712_PBM | CGACCGTTA | TAACGGTCG |
| TFAP2A_TFAP2A_4_SELEX | AGCCTGAGGCA | TGCCTCAGGCT |
| ZNF691_1 | ATAGTGAGCACTGTTCG | CGAACAGTGCTCACTAT |
| GMEB2_GMEB2_2_SELEX\|GMEB2_2 | AACGTAACCACGTA | TACGTGGTTACGTT |
| STAT1_STAT1_f2_HocoMoco | CATTTCCCGGAAATG | CATTTCCGGGAAATG |
| NR2E1_tll_FlyReg_FBgn0003720_B1H | AAAGTCA | TGACTTT |
| RELA_GM12878_NFKB_Stanford_ChIP-seq | AAGGGGATTTCCAA | TTGGAAATCCCCTT |
| PTF1A_Fer1_SANGER_5_FBgn0037475_B1H | ACGACAGCTGACG | CGTCAGCTGTCGT |
| MSX1_V$MSX1_01_Transfac\|MSX1_1 | CAATTACGG | CCGTAATTG |
| TFAP2A_HeLa-S3_AP2ALPHA_UCD_ChIP-seq | ACTGCCTCAGGGCAT | ATGCCCTGAGGCAGT |
| GATA2_V$GATA1_03_Transfac\|GATA_known5 | AGGAAGATTACCGC | GCGGTAATCTTCCT |
| ELF3_EHF_si_HocoMoco | AAACCCGGAAGTA | TACTTCCGGGTTT |
| ZNF282_ZNF282_1_SELEX\|ZNF282_1 | CTTTCCCACAACACGAC | GTCGTGTTGTGGGAAA |
| | | G |
| ZNF232_ZNF232_1_SELEX\|ZNF232_1 | ATGTTAAATGTAGATTA | CTTAATCTACATTTAACA |
| | AG | T |
| ALX3_1 | CTCAGCTAATTAGTTTA | TAAACTAATTAGCTGAG |
| POU3F3_pTH9245_PBM | ATGCTAATTA | TAATTAGCAT |
| PRDM16_V$EVI1_05_Transfac\|PRDM16_V$EVI1_03_Trans | AGATAAGATAA | TTATCTTATCT |
| fac\|RUNX1_4\|RUNX1_6 | | |
| HOXB13_Hoxb13_3479_PBM\|HOXB13_Hoxc13_3127_PB | GCTCATAAAA | TTTTATGAGC |
| M | | |
| NR2F2_COT2_f2_HocoMoco | AAGGTCAAAGGTCAA | TTGACCTTTGACCTT |
| IRF9_IRF9_f1_HocoMoco | AGTTTCGCTTTC | GAAAGCGAAACT |
| EGR3_Egr3_1_SELEX\|EGR3_3 | AAATGCGTGGGCGTA | TACGCCCACGCATTT |
| DNMT1_pTH7029_PBM | CCCCGCGGCC | GGCCGCGGGG |
| FOXD1_Foxc1_2_SELEX\|FOXC1_7 | ATAAACA | TGTTTAT |
| GCM1_pTH7965_PBM\|GCM1_Gcm1_3732_PBM | ACCCGCATC | GATGCGGGT |
| SRF_V$SRF_01_Transfac\|SRF_known1 | ATGCCCATATATGGTAA | ATTACCATATATGGGCA |
| | T | T |
| PAX9_pTH8556_PBM | CATGACCACC | GGTGGTCATG |
| TLX2_2 | AAGTTATTAATTAATTA | TAATTAATTAATAACTT |
| ZNF691_Zfp691_0895_PBM | AGGAGCAC | GTGCTCCT |
| ETV5_Ets65A_SANGER_10_FBgn0005658_B1H | ATTTCCGG | CCGGAAAT |
| SOX17_Sox17_2_SELEX\|SOX17_5 | ATGAATGAAATTCAT | ATGAATTTCATTCAT |
| ATF5_ATF4_1_SELEX\|ATF4_2 | GGATGATGCAATA | TATTGCATCATCC |
| XBP1_V$HTF_01_Transfac | ATTAAATGACACGTCAT | CAGAAAGATGACGTGTC |
| | CTTTCTG | ATTTAAT |
| SIX6_pTH5437_PBM | TAGGGGATAA | TTATCCCCTA |
| TP63_TP63_1_SELEX\|TP63_1 | AACATGTTGGGACATGT | GACATGTCCCAACATGT |
| | C | T |
| ZBTB33_disc4 | AACCTCGC | GCGAGGTT |
| TBX3_TBX4_2_SELEX\|TBX3_TBX5_2_SELEX\|TBX4_2\|TBX5_ | AGGTGTGAAATTTCACA | AGGTGTGAAATTTCACA |
| 5 | CCT | CCT |
| GATA_disc2 | GTGTGAGTCA | TGACTCACAC |
| RFX3_1 | TGTGACCCTTAGCAACC | TTAATCGGTTGCTAAGG |
| | GATTAA | GTCACA |
| AP1_disc6 | AAAACCCGGAGCGGA | TCCGCTCCGGGTTTT |
| ZFHX3_ZFHX3_f1_HocoMoco | ATTAATAATTA | TAATTATTAAT |
| HOXC10_HOXD11_2_SELEX\|HOXD11_3 | GGTAATAAAA | TTTTATTACC |
| HOXA4_Ind_Cell_FBgn0025776_B1H | CACTAATTA | TAATTAGTG |
| NKX2-6_1 | AATGTTAAGTGGCTTA | TAAGCCACTTAACATT |
| SP9_SP1_f1_HocoMoco\|SP9_MA0079.3_ChIP-seq | GCCCCGCCCCC | GGGGGCGGGGC |
| BARHL2_CG11085_SOLEXA_FBgn0030408_B1H | ACCAATTAAA | TTTAATTGGT |
| TEF_pTH4377_PBM | AATTTATGTAATA | TATTACATAAATT |
| SRF_disc2 | GAGGGGCCGGC | GCCGGCCCCTC |
| IRF_known7 | GAAAGTGAAACTGAA | TTCAGTTTCACTTTC |
| PRDM16_V$EVI1_04_Transfac\|RUNX1_5 | AGATAAGATAAGATA | TATCTTATCTTATCT |
| STAT5B_V$STAT56_01_Transfac\|STAT_known5 | AAATTCCAGGAAATC | GATTTCCTGGAATTT |
| TP53_V$P53_01_Transfac\|TP53_P53_f2_HocoMoco | AGACATGCCCGGGCAT | GGACATGCCCGGGCAT |
| | GTCC | GTCT |
| EGR3_GM12878_EGR1_HudsonAlpha_ChIP-seq | CCCCCCCCCCGCCCCCG | GTGCGGGGGCGGGGG |
| | CAC | GGGGG |
| IRF3_IRF3_f1_HocoMoco | GGAAAGCGAAACTGAA | TTTCAGTTTCGCTTTCC |
| | A | |
| NFIL3_2 | ATGTTACATAA | TTATGTAACAT |
| CUX1_V$CDPCR1_01_Transfac\|CUX1_3 | AATCGATCGC | GCGATCGATT |
| OVOL1_ovo_FlyReg_FBgn0003028_B1H | AGTAACGG | CCGTTACT |
| PPARA_V$PPARG_03_Transfac\|PPARA_3 | AACTAGGGCAAAGGTC | TGACCTTTGCCCTAGTT |
| | A | |
| ZEB1_V$AREB6_02_Transfac\|ZEB1_known2 | ATTCACCTGTAC | GTACAGGTGAAT |
| VDR_pTH5509_PBM | ATGAACC | GGTTCAT |
| HNF4G_V$HNF4_01_Transfac | ACAGGGTCAAAGGTCA | TCGTGACCTTTGACCCT |
| | CGA | GT |
| RARG_RARA_S_SELEX\|RARA_6 | AAAGGTCATGTGAGGTC | TGACCTCACATGACCTTT |
| | A | |
| FOXA2_FOXA2_f1_HocoMoco | CTAAGTAAACAA | TTGTTTACTTAG |
| ATF3_known10 | CTCTGACGTCA | TGACGTCAGAG |
| MYPOP_pTH3456_PBM | TGGCGCAAAA | TTTTGCGCCA |
| TWIST2_MA0249.1_DNaseI\|TWIST2_twi_FlyReg_FBgn000 | CAACATATGCGA | TCGCATATGTTG |
| 3900_B1H | | |
| GBX2_MA0224.1_B1H\|DLX1_DII_Cell_FBgn0000157_B1H\| | GTAATTA | TAATTAC |
| GBX2_Exex_Cell_FBgn0041156_B1H\|DLX1_MA0187.1_B1 | | |
| H | | |
| IRX3_Irx3_2226_PBM | ATTACATG | CATGTAAT |
| PPARA_V$PPARG_02_Transfac\|RXRA_known2 | AAGTAGGTCACCGTGAC | AAGTAGGTCACGGTGA |
| | CTACTT | CCTACTT |
| NR2E1_NR2E1_1_SELEX\|NR2E1_Nr2e1_1_SELEX\|NR2E1_1 | AAAAGTCAA | TTGACTTTT |
| \|NR2E1_3 | | |
| HOXC5_Hoxb4_2627_PBM\|HOXC5_Hoxb5_3122_PBM\|HO | GGTCATTAA | TTAATGACC |
| XC5_Hoxb3_1720_PBM\|HOXC5_Hoxc4_3491_PBM\|HOXC | | |
| 5_Hoxa3_2783_PBM | | |
| FOXA2_V$HNF36_01_Transfac | TAAATAAACATTTCA | TGAAATGTTTATTTA |
| AP1_known2 | GGTGACTCAGA | TCTGAGTCACC |
| FEZF2_CG31670_SOLEXA_5_FBgn0031375_B1H | CAAAAAGAGCAACCA | TGGTTGCTCTTTTTG |
| ARNT2_pTH5111_PBM | AAGCACGTGATT | AATCACGTGCTT |
| MYBL2_MYBL2_3_SELEX\|MYBL2_3 | ATAACCGTTAA | TTAACGGTTAT |
| HNF4_disc3 | AGTCCAAAG | CTTTGGACT |
| HOXC5_Hoxb6_3428_PBM | GCCATTA | TAATGGC |
| FOXD1_FOXA1_f1_HocoMoco\|EP300_disc3\|FOXA_known | CAAAGTAAACA | TGTTTACTTTG |
| 5 | | |
| CREB3L2_CREB3L1_5_SELEX\|CREB3L2_CREB3L1_3_SELEX\| | TGCCACGTGGCA | TGCCACGTGGCA |
| CREB3L2_Creb3l2_2_SELEX\|CREB3L2_CREB3L1_2_SELEX\|C | | |
| REB3L1_2\|CREB3L1_3\|CREB3L2_2 | | |
| E2F_disc2\|EGR1_disc3 | GCGCATGCGC | GCGCATGCGC |
| FOXD1_ECC-1_FOXA1_HudsonAlpha_ChIP-seq | CCCTAAGTAAACAAA | TTTGTTTACTTAGGG |
| TP53_1 | GGACATGCCCGGGCAT | GGACATGCCCGGGCAT |
| | GTCC | GTCC |
| FOXD1_FOXC1_f1_HocoMoco | CGTTGTTTACTTAAG | CTTAAGTAAACAACG |
| PKNOX2_Mrg2_2302_PBM\|PKNOX2_Mrg1_2246_PBM | ACCTGTCAA | TTGACAGGT |
| SCRT2_scrt_SOLEXA_2.5_2_FBgn0004880_B1H | ACCACCTGTTGCA | TGCAACAGGTGGT |
| MYBL1_MYB_f1_HocoMoco | CAGTTGG | CCAACTG |
| MEIS1_pTH5781_PBM | ACCTGTCAT | ATGACAGGT |
| TP73_P73_si_HocoMoco | CAGACCTGCCCC | GGGGCAGGTCTG |
| JUN_HepG2_JUND_HudsonAlpha_ChIP-seq | GAGGATGAGTCAC | GTGACTCATCCTC |

[0155] All references, patents and patent applications disclosed herein are incorporated by reference with respect to the subject matter for which each is cited, which in some cases may encompass the entirety of the document.

[0156] The indefinite articles “a” and “an,” as used herein in the specification and in the claims, unless clearly indicated to the contrary, should be understood to mean “at least one.”

[0157] It should also be understood that, unless clearly indicated to the contrary, in any methods claimed herein that include more than one step or act, the order of the steps or acts of the method is not necessarily limited to the order in which the steps or acts of the method are recited.

[0158] In the claims, as well as in the specification above, all transitional phrases such as “comprising,” “including,” “carrying,” “having,” “containing,” “involving,” “holding,” “composed of,” and the like are to be understood to be open-ended, i.e., to mean including but not limited to. Only the transitional phrases “consisting of” and “consisting essentially of” shall be closed or semi-closed transitional phrases, respectively, as set forth in the United States Patent Office Manual of Patent Examining Procedures, Section 2111.03.

What is claimed is:

1. An engineered nucleic acid comprising a promoter that comprises the following consensus sequence: TFBS-AGA-TFBS- TCG-TFBS-GAC-TFBS-CTA-TFBS-ACT-TFBS-TGC-TFBS-GTA-TFBS, wherein TFBS is a transcription factor binding site sequence of Table 5.

2. The engineered nucleic acid of claim 1, wherein the activity of the promoter is increased in diseased cells relative to healthy cells.

3. The engineered nucleic acid of claim 1, wherein the activity of the promoter is decreased in diseased cells relative to healthy cells.

4. The engineered nucleic acid of claim 2 or 3, wherein the diseased cells are selected from breast cancer cells, colon cancer cells, and ovarian cancer cells.

5. The engineered nucleic acid of any one of claims 1-4, wherein the promoter is operably linked to a nucleotide sequence encoding a therapeutic protein.

6. The engineered nucleic acid of any one of claim 1, 2, 4, or 5, wherein the transcription factor binding site sequence comprises the following sequence: CCACGTGC (SEQ ID NO: 12265).

7. The engineered nucleic acid of claim 6, wherein the promoter comprises the following sequence:
(SEQ ID NO: 12266)
CCACGTGCAGACCACGTGCTCGCCACGTGCGACCCACGTGCCTACCACG
TGCACTCCACGTGCTGCCCACGTGCGTACCACGTGCG.

8. The engineered nucleic acid of any one of claim 1, 2, 4, or 5, wherein the transcription factor binding site sequence comprises the following sequence: TGCTGAGTCAGCA (SEQ ID NO: 12267).

9. The engineered nucleic acid of claim 8, wherein the promoter comprises the following sequence:
(SEQ ID NO: 12268)
TGCTGAGTCAGCAAGATGCTGAGTCAGCATCGTGCTGAGTCAGCAGACT
GCTGAGTCAGCACTATGCTGAGTCAGCAACTTGCTGAGTCAGCATGCTG
CTGAGTCAGCAGTATGCTGAGTCAGCAG.

10. A cell comprising the engineered nucleic acid of any one of claims 1-9.

11. An oncolytic virus comprising the engineered nucleic acid of any one of claims 1-9.

12. The oncolytic virus of claim 11, wherein the oncolytic virus is an oncolytic herpes simplex virus.

13. A method of delivering to a cell, optionally in a subject, the engineered nucleic acid of any one of claims 1-9 or the oncolytic virus of claim 11 or 12.

14. An engineered nucleic acid comprising a promoter that comprises a nucleotide sequence identified by any one of SEQ ID NOS: 1-12263, or a nucleotide sequence at least 95% identical to a nucleotide sequence identified by any one of SEQ ID NOS: 1-12263.

15. The engineered nucleic acid of claim 14, wherein the nucleotide sequence is identified by any one of SEQ ID NO: 1-49 or a nucleotide sequence at least 95% identical to any one of SEQ ID NO: 1-49.

The application's sequence listing, which the Patent Office published only in electronic form, follows.

SEQUENCE LISTING (12263 sequences)

SEQ ID NO: 1 - DNA, 203 bp, Artificial Sequence
  Synthetic polynucleotide
caggggatgctttaggcgggaaagtcagagtttctgcctccatttcccaggggatgctttaggcgggaaagtcagagtttctgcctccatttgtcatgcatctcaattacccaggggatgctttaggcgggaaagtcagagtttctgcctccatttcccaggggatgctttaggcgggaaagtcagagtttctgcctccattt

SEQ ID NO: 2 - DNA, 186 bp, Artificial Sequence
  Synthetic polynucleotide
cccgtttccagccgaaacgtagccgtttcgtactcgagctttggcgcatccgtttcccgaattcccgaaacgttcctttggcgctgccctactgacactgcctgcgtttccagccgaaacgtagccgtttcgtactcgagctttggcgcatccgtttcccgaattcccgaaacgttcctttggcgc

SEQ ID NO: 3 - DNA, 502 bp, Artificial Sequence
  Synthetic polynucleotide
cccgtttccagccgaaacgtagccgtttcgtactcgagctttggcgcatccgtttcccgaattcccgaaacgttcctttggcgctgccctactgacactgcctgcgtttccagccgaaacgtagccgtttcgtactcgagctttggcgcatccgtttcccgaattcccgaaacgttcctttggcgcggcgcgccagacgctagcggggggctataaaagggggtgggggcgttcgtcctcactctagatctgcgatctaagtaagcttgatatcgcggccgcccctggacacccttggaagcaaatcccctgcaggcccgtttccagccgaaacgtagccgtttcgtactcgagctttggcgcatccgtttcccgaattcccgaaacgttcctttggcgctgccctactgacactgcctgcgtttccagccgaaacgtagccgtttcgtactcgagctttggcgcatccgtttcccgaattcccgaaacgttcctttggcgc

SEQ ID NO: 4 - DNA, 248 bp, Artificial Sequence
  Synthetic polynucleotide
ccggtgactcagtagcggtgactcagaatcgatgactcagacagtgactaagtactatgagtcaggtcgaatgagtcagcgagtgactcaatggtccatgactcacgaattcctgccctactgacactgcctgccggtgactcagtagcggtgactcagaatcgatgactcagacagtgactaagtactatgagtcaggtcgaatgagtcagcgagtgactcaatggtccatgactcagaatatccgc

SEQ ID NO: 5 - DNA, 521 bp, Artificial Sequence
  Synthetic polynucleotide
ccggtgactcagtagcggtgactcagaatcgatgactcagacagtgactaagtactatgagtcaggtcgaatgagtcagcgagtgactcaatggtccatgactcacgaattcctgccctactgacactgcctgccggtgactcagtagcggtgactcagaatcgatgactcagacagtgactaagtactatgagtcaggtcgaatgagtcagcgagtgactcaatggtccatgactcagaatatccgcggcttggaagcaaatcccctgcaggccggtgactcagtagcggtgactcagaatcgatgactcagacagtgactaagtactatgagtcaggtcgaatgagtcagcgagtgactcaatggtccatgactcacgaattcctgccctactgacactgcctgccggtgactcagtagcggtgactcagaatcgatgactcagacagtgactaagtactatgagtcaggtcgaatgagtcagcgagtgactcaatggtccatgactcagaatatccgc

SEQ ID NO: 6 - DNA, 278 bp, Artificial Sequence
  Synthetic polynucleotide
tccacacgtgcaagccgagcacgtggctcatcaccacgagtcagacaaccacgtgctcactgaccacgtgcctgtcggccacgtgtgagtccacacgtgcatcccgagcacgtggctccgaattcctgccctactgacactgcctgccgtccacacgtgcaagccgagcacgtggctcatcaccacgagtcagacaaccacgtgctcactgaccacgtgcctgtcggccacgtgtgagtccacacgtgcatcccgagcacgtggctccgaatatccgc

SEQ ID NO: 7 - DNA, 258 bp, Artificial Sequence
  Synthetic polynucleotide
cgtacgtgcggcagcccggacgtgcgccatctgcgtgaggacgcgcgtgacaactcgtacgtgcggcgtcccggacgtgcgccgagtgcgtgagtccgcgcgtgacaccgaattcctgccctactgacactgcctgccgcgtacgtgcggcagcccggacgtgcgccatctgcgtgaggacgcgcgtgacaactcgtacgtgcggcgtcccggacgtgcgccgagtgcgtgagtccgcgcgtgacaccgaatatccgc

SEQ ID NO: 8 - DNA, 298 bp, Artificial Sequence
  Synthetic polynucleotide
ctcatttcaaaaaagccccatttaagagtatcctcatttcagattgactatttggtaaactatatttggcaatgcacgtcgtattttgcaatggctgagctcatttcaaaaatcccccatttaagagtcgaattcctgccctactgacactgcctgccgctcatttcaaaaaagccccatttaagagtatctatttggtaagacctcatttcagattactgtattttgcaatggctgtcatatttggcaatgcacgagcccatttaagagttccctcatttcaaaaacgaatatccgc

SEQ ID NO: 9 - DNA, 297 bp, Artificial Sequence
  Synthetic polynucleotide
ccgcgaggaggcagagctgaccactagatggcagtaatctggccaccagagggcgcgactcgccactaggtggcgcacttggccaccagggggcgccagtcccgcgaggaggcaggagtggccaccagagggcgccgaattcctgccctactgacactgcctgccgtcgccactaggtggcgcagctggccaccagggggcgccagacccgcgaggaggcagacttgaccactagatggcagtagagtggccaccagggggcgccatcctcgccactaggtggcgccgaatatccgc

SEQ ID NO: 10 - DNA, 268 bp, Artificial Sequence
  Synthetic polynucleotide
cgaccatctggtagccgaacatctgttatccgaccatctgttgacccacctgcccgactccagctgctcggtccgaccatctggtgagccacctgcccgtcccgaccatctgttcgaattcctgccctactgacactgcctgccgccacctgcccgagcccagctgctcgatccgaccatctggtgaccgaacatctgttactccagctgctcggtcccacctgcccggagccagctgctcgtcccgaccatctggtcgaatatccgc

SEQ ID NO: 11 - DNA, 278 bp, Artificial Sequence
  Synthetic polynucleotide
ctgattggccaaagcctgattggccaaatcctgattggccaagacctgattggccaaactctgattggccaagtctctgattggccaaggagctgattggccaatccctgattggccaacgaattcctgccctactgacactgcctgccgctgattggccaaagcctgattggccaaatcctgattggccaagacctgattggccaaactctgattggccaagtcctgattggccaagagctgattggccaatccctgattggccaacgaatatccgc

SEQ ID NO: 12 - DNA, 275 bp, Artificial Sequence
  Synthetic polynucleotide
aaacaggaagttcgtagcccaaccggaagtatcaaccggaagtagacgaccggaagtaactgaccggaagtagtcgaccggaagtggagaaacaggaagttcgttccccaaccggaagtcgaattcctgccctactgacactgcctgccggaccggaagtaagcaaccggaagtaatcgaccggaagtggacaaacaggaagttcgtactccaaccggaagtgtcaaccggaagtagaggaccggaagtatccgaccggaagtgcgaatatccgc

SEQ ID NO: 13 - DNA, 288 bp, Artificial Sequence
  Synthetic polynucleotide
ggcccaggggatgctttaggcgagcggcccaggggatgctttaggcgatcggcccaggggatgctttaggcggacggcccaggggatgctttaggcgactggcccaggggatgctttaggcggtcgaattcctgccctactgacactgcctgccgggcccaggggatgctttaggcgagcggcccaggggatgctttaggcgatcggcccaggggatgctttaggcggacggcccaggggatgctttaggcggtcggcccaggggatgctttaggcgcgaatatccgc

SEQ ID NO: 14 - DNA, 307 bp, Artificial Sequence
  Synthetic polynucleotide
cggttgccatggcaaccgagccggtttccatggaaacaaatcaagttactaggcaaaaggaccggttgccatggcaaccgactaagttactaggcaaaaggagcggtttccatggaaacaatcccggttgccatggcaaccgcgaattcctgccctactgacactgcctgccgaagttactaggcaaaagagccggttgccatggcaaccgatccggtttccatggaaacaagaccggttgccatggcaaccgactaagttactaggcaaaaggtccggtttccatggaaacaatccgaatatccgc

SEQ ID NO: 15 - DNA, 420 bp, Artificial Sequence
  Synthetic polynucleotide
cccaggggatgctttaggcgggaaagtcagagtttctgcctccatttcccaggggatgctttaggcgggaaagtcagagtttctgcctccatttgtcatgcatctcaattacccaggggatgctttaggcgggaaagtcagagtttctgcctccatttcccaggggatgctttaggcgggaaagtcagagtttctgcctccatttggcctgcaggcccaggggatgctttaggcgggaaagtcagagtttctgcctccatttcccaggggatgctttaggcgggaaagtcagagtttctgcctccatttgtcatgcatctcaattacccaggggatgctttaggcgggaaagtcagagtttctgcctccatttcccaggggatgctttaggcgggaaagtcagagtttctgcctccattt

SEQ ID NO: 16 - DNA, 287 bp, Artificial Sequence
  Synthetic polynucleotide
tagggtgggcgtggcagccggggcggggcatctagggcggggccgacggggggcggggccacttagggtgggcgtggcgtccggggcggggcgagtagggcggggcctccggggggcggggcccgaattctgccctactgacactgcctgccgtagggtgggcgtggcagccggggcggggcatctagggcggggccgacggggggcggggccacttagggtgggcgtggcgtccggggcggggcgagtagggcggggcctccggggggcggggcccgaatatccgc

SEQ ID NO: 17 - DNA, 295 bp, Artificial Sequence
  Synthetic polynucleotide
cgggtgacgtcaacggagcgggctgacgtaaacggatctgacgtcagaccaatgacgtcacgactcgggtgacgtcaacgggtcgggctgacgtaaacgggagtgacgtcatcccaatgacgtcacgcgaattctgccctactgacactgcctgccgcgggtgacgtcaacggagcgggctgacgtaaacggatctgacgtcagaccaatgacgtcacgactcgggtgacgtcaacgggtcgggctgacgtaaacgggagtgacgtcatcccaatgacgtcacgcgaatatccgc

SEQ ID NO: 18 - DNA, 295 bp, Artificial Sequence; identical to SEQ ID NO: 17
  Synthetic polynucleotide

SEQ ID NO: 19 - DNA, 279 bp, Artificial Sequence
  Synthetic polynucleotide
tacgcgcgaaaactgagcgcgccaaaatcgctgagcgcgaaacggacggggcgggaagacttacgcgcgaaaactggtcgcgccaaagaggctgagcgcgaaacgtccggggcgggaagcgaattctgccctactgacactgcctgccgtacgcgcgaaaactgagcgcgccaaaatcgctgagcgcgaaacggacggggcgggaagacttacgcgcgaaaactggtcgcgccaaagaggctgagcgcgaaacgtccggggcgggaagcgaatatccgc

SEQ ID NO: 20 - DNA, 287 bp, Artificial Sequence
  Synthetic polynucleotide
tctgatgcaatagcggtatgatgcaaggaatcagattgtgaaatgtgacattgtgaaataacttctgatgcaatgtcggtatgatgcaaggagagagattgtgaaatgttccattgtgaaatacgaattctgccctactgacactgcctgccgtctgatgcaatagcggtatgatgcaaggaatcagattgtgaaatgtgacattgtgaaataacttctgatgcaatgtcggtatgatgcaaggagagagattgtgaaatgttccattgtgaaatacgaatatccgc

SEQ ID NO: 21 - DNA, 295 bp, Artificial Sequence
  Synthetic polynucleotide
tcagccaatcagagagcgagccaatcagaatcccagccaatcagagactgggccaatcagaaacttcagccaatcagaggtcgagccaatcagagagccagccaatcagatcctgggccaatcagaacgaattctgccctactgacactgcctgccgtcagccaatcagagagcgagccaatcagaatcccagccaatcagagactgggccaatcagaaacttcagccaatcagaggtcgagccaatcagagagccagccaatcagatcctgggccaatcagaacgaatatccgc

SEQ ID NO: 22 - DNA, 276 bp, Artificial Sequence
  Synthetic polynucleotide
agccgcacgtgacagcagccgcacgtgacatccacccacgtgcgaccacccacgtgcactagccgcacgtgaccacagccgcacgtgacgagcacccacgtgctcccacccacgtgccgaattctgccctactgacactgcctgccgagccgcacgtgacagcagccgcacgtgacatccacccacgtgcgaccacccacgtgcactagccgcacgtgaccatcagccgcacgtgacgagcacccacgtgctcccacccacgtgccgaatatccgc

SEQ ID NO: 23 - DNA, 276 bp, Artificial Sequence
  Synthetic polynucleotide
gaccacgtggaagcgaccacgtggaatccgccacgtgcgcgaccgccacgtgcgcactagaccacgtggtcgtcagaccacgtggtcgagaaaacacgtggttccaaaacacgtggtcgaattctgccctactgacactgcctgccggaccacgtggaagcgaccacgtggaatccgccacgtgcgcgaccgccacgtgcgcactagaccacgtggtcgtcagaccacgtggtcgagaaaacacgtggttccaaaacacgtggtcgaatatccgcg

SEQ ID NO: 24 - DNA, 295 bp, Artificial Sequence
  Synthetic polynucleotide
tagcctggggccgagctagcctggggccgatcaccgcctgaggggagacaccgcctgaggggaacttgccctggggccgtctgccctggggccgagttgccctagggcattccttgccctagggcatcgaattctgccctactgacactgcctgccgtagcctggggccgagctagcctggggccgatcaccgcctgaggggagacaccgcctgaggggaacttgccctggggccgtctgccctggggccgagttgccctagggcattccttgccctagggcatcgaatatccgc

SEQ ID NO: 25 - DNA, 259 bp, Artificial Sequence
  Synthetic polynucleotide
gggaattcccagcgggaattcccatcggggactttccagacggggactttccaactgggaattcccgtcgggaattcccgagggggactttccatccggggactttccacgaattctgccctactgacactgcctgccggggaattcccagcgggaattcccatcggggactttccagacggggactttccaactgggaattcccgtcgggaattcccgagggggactttccatccggggactttccacgaatatccgc

SEQ ID NO: 26 - DNA, 295 bp, Artificial Sequence
  Synthetic polynucleotide
agcgcatttcccggaaatgatatctattccaggaactgactattccaggaactactgcatttcccggaaatgatgtcgcatttcccggaaatgatgagtattccaggaacttcctattccaggaactcgaattctgccctactgacactgcctgccggcatttcccggaaatgatagcgcatttcccggaaatgatactattccaggaactactgcatttcccggaaatgatgtcgcatttcccggaaatgatgagtattccaggaacttcctattccaggaactcgaatatccg

SEQ ID NO: 27 - DNA, 312 bp, Artificial Sequence
  Synthetic polynucleotide
atgcgtgggcgtagcatgcgtgggcgtatccgcggcgggggcggaggaccgcggcgggggcggagactaatgcgggggcggagtcaatgcgggggcggagaggggcgggggcggggcctccgggcgggggcggggcccgaattctgccctactgacactgcctgccgatgcgtgggcgtacatgcgtgggcgtatccgcggcgggggcggaggccgcggcgggggcggagctaatgcgggggcggagtcaatgcgggggcggagaggggcgggggcggggcctccgggcgggggcggggcccgaatatccgc

SEQ ID NO: 28 - DNA, 186 bp, Artificial Sequence
  Synthetic polynucleotide
gcgccaaaggaacgtttcgggaattcgggaaacggatgcgccaaagctcgagtacgaaacggctacgtttcggctggaaacgcaggcagtgtcagtagggcagcgccaaaggaacgtttcgggaattcgggaaacggatgcgccaaagctcgagtacgaaacggctacgtttcggctggaaacggg

SEQ ID NO: 29 - DNA, 390 bp, Artificial Sequence
  Synthetic polynucleotide
gcgccaaaggaacgtttcgggaattcgggaaacggatgcgccaaagctcgagtacgaaacggctacgtttcggctggaaacgcaggcagtgtcagtagggcagcgccaaaggaacgtttcgggaattcgggaaacggatgcgccaaagctcgagtacgaaacggctacgtttcggctggaaacgcaggcagtgtcagtagggcagcgccaaaggaacgtttcgggaattcgggaaacggatgcgccaaagctcgagtacgaaacggctacgtttcggctggaaacgcaggcagtgtcagtagggcagcgccaaaggaacgtttcgggaattcgggaaacggatgcgccaaagctcgagtacgaaacggctacgtttcggctggaaacggg

SEQ ID NO: 30 - DNA, 297 bp, Artificial Sequence
  Synthetic polynucleotide
gcggatattcggcgccacctagtggcgaggatggcgccccctggtggccactctactgccatctagtggtcaagtctgcctcctcgcgggtctggcgccccctggtggccagctgcgccacctagtggcgacggcaggcagtgtcagtagggcaggaattcggcgccctctggtggccactcctgcctcctcgcgggactggcgccccctggtggccaagtgcgccacctagtggcgagtcgcgccctctggtggccagattactgccatctagtggtcagctctgcctcctcgcgg

SEQ ID NO: 31 - DNA, 268 bp, Artificial Sequence
  Synthetic polynucleotide
gcggatattcgaccagatggtcgggacgagcagctggctccgggcaggtgggaccgagcagctggagtaacagatgttcggtcaccagatggtcggatcgagcagctgggctcgggcaggtggcggcaggcagtgtcagtagggcaggaattcgaacagatggtcgggacgggcaggtggctcaccagatggtcggaccgagcagctggagtcgggcaggtgggtcaacagatggtcggataacagatgttcggctaccagatggtcg

SEQ ID NO: 32 - DNA, 274 bp, Artificial Sequence
  Synthetic polynucleotide
gaccacgtggaaagcgaccacgtggaaatcgaccacgtggaagacgaccacgtggaaactgaccacgtggaagtcgaccacgtggaagaggaccacgtggaatccgaccacgtggaagaattctgccctactgacactgcctgccggaccacgtggaaagcgaccacgtggaaatcgaccacgtggaagacgaccacgtggaaactgaccacgtggaagtcgaccacgtggaagaggaccacgtggaatccgaccacgtggaacgaatatccgc

SEQ ID NO: 33 - DNA, 275 bp, Artificial Sequence
  Synthetic polynucleotide
tccgccacgtgcgcgacgactccgccacgtgcgcgacacttccgccacgtgcgcgacgtctccgccacgtgcgcgacgagtccgccacgtgcgcgactcctccgccacgtgcgcgaccgaattctgccctactgacactgcctgccgtccgccacgtgcgcgacgactccgccacgtgcgcgacacttccgccacgtgcgcgacgtctccgccacgtgcgcgacgagtccgccacgtgcgcgactcctccgccacgtgcgcgaccgaatatccgc

SEQ ID NO: 34 - DNA, 291 bp, Artificial Sequence
  Synthetic polynucleotide
agaccacgtggtcagcagaccacgtggtcatcagaccacgtggtcgacagaccacgtggtcactagaccacgtggtcgtcagaccacgtggtcgagagaccacgtggtctccagaccacgtggtccgaattctgccctactgacactgcctgccgagaccacgtggtcagcagaccacgtggtcatcagaccacgtggtcgacagaccacgtggtcactagaccacgtggtcgtcagaccacgtggtcgagagaccacgtggtctccagaccacgtggtccgaatatccgc

SEQ ID NO: 35 - DNA, 275 bp, Artificial Sequence
  Synthetic polynucleotide
aaaacacgtggtagcaaaacacgtggtatcaaaacacgtggtgacaaaacacgtggtactaaaacacgtggtgtcaaaacacgtggtgagaaaacacgtggttccaaaacacgtggtcgaattctgccctactgacactgcctgccgaaaacacgtggtagcaaaacacgtggtatcaaaacacgtggtgacaaaacacgtggtactaaaacacgtggtgtcaaaacacgtggtgagaaaacacgtggttccaaaacacgtggtcgaatatccgc

SEQ ID NO: 36 - DNA, 135 bp, Artificial Sequence
  Synthetic polynucleotide
gtccgccacgtgcgcgacagtccgccacgtgcgcgactggtccgccacgtgcgcgaccgtccgccacgtgcgcgaccggtccgccacgtgcgcgaccgtccgccacgtgcgcgacgtgtccgccacgtgcgcgcc

SEQ ID NO: 37 - DNA, 131 bp, Artificial Sequence
  Synthetic polynucleotide
ttccgccacgtggcggaagttccgccacgtggcggaattccgccacgtggcggaaattccgccacgtggcggaattccgccacgtggcggaatttccgccacgtggcggaattccgccacgtggcggaacc

SEQ ID NO: 38 - DNA, 96 bp, Artificial Sequence
  Synthetic polynucleotide
gccacgtgagcgccacgtgatcgccacgtggacgccacgtgactgccacgtgagtgccacgtggtcgccacgtggatgccacgtggctgccacgtg

SEQ ID NO: 39 - DNA, 276 bp, Artificial Sequence
  Synthetic polynucleotide
gcggatattcgaccacgtgttttggaaccacgtgttttctcgaccacgtggtctgacgaccacgtggtctagtgcgcacgtggcggtcgcgcacgtggcggattccacgtggtcgcttccacgtggtccggcaggcagtgtcagtagggcagaattcgaccacgtgttttggaaccacgtgttttctcgaccacgtggtctgacgaccacgtggtctagtgcgcacgtggcggtcgcgcacgtggcggattccacgtggtcgcttccacgtggtcc

SEQ ID NO: 40 - DNA, 601 bp, Artificial Sequence
  Synthetic polynucleotide
ggccgccctgcacctgcagggaccacgtggaagcgaccacgtggaatccgccacgtgcgcgaccgccacgtgcgcactagaccacgtggtcgtcagaccacgtggtcgagaaaacacgtggttccaaaacacgtggtcgaattctgccctactgacactgcctgccggaccacgtggaagcgaccacgtggaatccgccacgtgcgcgaccgccacgtgcgcactagaccacgtggtcgtcagaccacgtggtcgagaaaacacgtggttccaaaacacgtggtcgaatatccgcggcgcgccagacgtgcagggaccacgtggaagcgaccacgtggaatccgccacgtgcgcgaccgccacgtgcgcactagaccacgtggtcgtcagaccacgtggtcgagaaaacacgtggttccaaaacacgtggtcgaattctgccctactgacactgcctgccggaccacgtggaagcgaccacgtggaatccgccacgtgcgcgaccgccacgtgcgcactagaccacgtggtcgtcagaccacgtggtcgagaaaacacgtggttccaaaacacgtggtcgaatatccgcggcgcgccagac

SEQ ID NO: 41 - DNA, 94 bp, Artificial Sequence
  Synthetic polynucleotide
gacgccatgacgcatgacgccatgacgccatgacgccatgacgccatgacgccatgacgcatgacgccatgacgccatgacgccattacgccat

SEQ ID NO: 42 - DNA, 96 bp, Artificial Sequence
  Synthetic polynucleotide
gggggtccagcgggggtccatcgggggtccgacgggggtccactgggggtccagtgggggtccgtcgggggtccgatgggggtccgctgggggtcc

SEQ ID NO: 43 - DNA, 95 bp, Artificial Sequence
  Synthetic polynucleotide
agtggggtagcagtgggtatcagtggggtgacagtggggtactagtggggtagtagtggggtgtcagtggggtgatagtggggtgctagtggggt

SEQ ID NO: 44 - DNA, 95 bp, Artificial Sequence
  Synthetic polynucleotide
gtgcccgcgtaatcccgcccgcgtagacccgcccgcgtaactccgcccgcgtaagtccgcccgcgtagtcccgcccgcgtagatccgcccgcgta

SEQ ID NO: 45 - DNA, 96 bp, Artificial Sequence
  Synthetic polynucleotide
gagacatagagacatagagacatagagacatagagacatagagacatagagacatagagacatagagacatagagacatagagacatagagacata

SEQ ID NO: 46 - DNA, 88 bp, Artificial Sequence
  Synthetic polynucleotide
cactgggtcacggggtcacggggtcacggggtcacggggtcacggggtcacggggtcacggggtcacggggtcacggggtcacggggt

SEQ ID NO: 47 - DNA, 96 bp, Artificial Sequence
  Synthetic polynucleotide
gggaatgagggaatgagggaatgagggaatgagggaatgagggaatgagggaatgagggaatgagggaatgtgggaatgtgggaatgtgggaatgt

SEQ ID NO: 48 - DNA, 96 bp, Artificial Sequence
  Synthetic polynucleotide
gaaggcaggaaggcaggaaggcaggaaggcaggaaggcaggaaggcaggaaggcaggaaggcaggaaggcaggaaggcaggaaggcaggaaggcag

SEQ ID NO: 49 - DNA, 93 bp, Artificial Sequence
  Synthetic polynucleotide
gggccaaatggatcgggccaaatgggacggggcaaatggactgggcaaatggagtggggcaaatgggtcgggcaaatgggatggggcaaatgg

SEQ ID NO: 50 - DNA, 191 bp, Artificial Sequence
  Synthetic polynucleotide
atcatctcaccttgcctcctgtggagagatttatctggcctgcaggccaattaattaattacgagaccaattaattaattacgtcgccaattaattaattacggacccaattaattaattacgctaccaattaattaattacgactccaattaattaattacgtgcggcgcgccatgcttcatcagactct

SEQ ID NO: 51 - DNA, 191 bp, Artificial Sequence; identical to SEQ ID NO: 50
  Synthetic polynucleotide

SEQ ID NO: 52 - DNA, 196 bp, Artificial Sequence
  Synthetic polynucleotide
atcatctcaccttgcctcctggaccgaatacactgtgacctgcaggaatgattgatgcaagaaatgattgatgcatcgaatgattgatgcagacaatgattgatgcactaaatgattgatgcaactaatgattgatgcatgcaatgattgatgcagtaaatgattgatgcaggcgcgccatgcttcatcagactct

SEQ ID NO: 53 - DNA, 196 bp, Artificial Sequence; identical to SEQ ID NO: 52
  Synthetic polynucleotide

SEQ ID NO: 54 - DNA, 185 bp, Artificial Sequence
  Synthetic polynucleotide
atcatctcaccttgcctcctgggtactgtaggtatccgcctgcaggggggtcaaagtccattagaggggtcaaagtccatttcgggggtcaaagtccattgacggggtcaaagtccattctaggggtcaaagtccattactggggtcaaagtccatttgcggcgcgccatgcttcatcagactct

SEQ ID NO: 55 - DNA, 185 bp, Artificial Sequence; identical to SEQ ID NO: 54
  Synthetic polynucleotide

SEQ ID NO: 56 - DNA, 191 bp, Artificial Sequence
  Synthetic polynucleotide
atcatctcaccttgcctcctgtaagggtcccattgtcccctgcaggaatattacatgtatattagaaatattacatgtatatttcgaatattacatgtatattgacaatattacatgtatattctaaatattacatgtatattactaatattacatgtatatttgcggcgcgccatgcttcatcagactct

SEQ ID NO: 57 - DNA, 191 bp, Artificial Sequence; identical to SEQ ID NO: 56
  Synthetic polynucleotide

SEQ ID NO: 58 - DNA, 196 bp, Artificial Sequence
  Synthetic polynucleotide
atcatctcaccttgcctcctgagctattctatgttcgtcctgcaggtgaaattctattgttctttattagatgaaattctattgttctttatttcgtgaaattctattgttctttattgactgaaattctattgttctttattctatgaaattctattgttctttattactggcgcgccatgcttcatcagactct

SEQ ID NO: 59 - DNA, 196 bp, Artificial Sequence; identical to SEQ ID NO: 58
  Synthetic polynucleotide

SEQ ID NO: 60 - DNA, 172 bp, Artificial Sequence
  Synthetic polynucleotide
atcatctcaccttgcctcctgtaaacagtgttacgaggcctgcaggccattgttttagaccattgtttttcgccattgttttgacccattgttttctaccattgttttactccattgtttttgcccattgttttgtaccattgttttggcgcgccatgcttcatcagactct

SEQ ID NO: 61 - DNA, 172 bp, Artificial Sequence; identical to SEQ ID NO: 60
  Synthetic polynucleotide

SEQ ID NO: 62 - DNA, 180 bp, Artificial Sequence
  Synthetic polynucleotide
atcatctcaccttgcctcctgccaggttatatgcctggcctgcaggcgcctcaggcaagacgcctcaggcatcgcgcctcaggcagaccgcctcaggcactacgcctcaggcaactcgcctcaggcatgccgcctcaggcagtacgcctcaggcaggcgcgccatgcttcatcagactct

SEQ ID NO: 63 - DNA, 180 bp, Artificial Sequence; identical to SEQ ID NO: 62
  Synthetic polynucleotide

SEQ ID NO: 64 - DNA, 190 bp, Artificial Sequence
  Synthetic polynucleotide
atcatctcaccttgcctcctggggtagggaagtgtgtgcctgcaggtataagtaggtcaaagatataagtaggtcaatcgtataagtaggtcaagactataagtaggtcaactatataagtaggtcaaacttataagtaggtcaatgctataagtaggtcaagtaggcgcgccatgcttcatcagactct

SEQ ID NO: 65 - DNA, 190 bp, Artificial Sequence; identical to SEQ ID NO: 64
  Synthetic polynucleotide

SEQ ID NO: 66 - DNA, 156 bp, Artificial Sequence
  Synthetic polynucleotide
atcatctcaccttgcctcctggaaatgcgaattggaagcctgcaggtggaaatcagatggaaatctcgtggaaatcgactggaaatcctatggaaatcacttggaaatctgctggaaatcgtatggaaatcggcgcgccatgcttcatcagactct

SEQ ID NO: 67 - DNA, 156 bp, Artificial Sequence; identical to SEQ ID NO: 66
  Synthetic polynucleotide

SEQ ID NO: 68 - DNA, 180 bp, Artificial Sequence
  Synthetic polynucleotide
atcatctcaccttgcctcctgctgctgaccggctgtttcctgcaggggtcgtaaaatagaggtcgtaaaattcgggtcgtaaaatgacggtcgtaaaatctaggtcgtaaaatactggtcgtaaaattgcggtcgtaaaatgtaggtcgtaaaatggcgcgccatgcttcatcagactct

SEQ ID NO: 69 - DNA, 180 bp, Artificial Sequence; identical to SEQ ID NO: 68
  Synthetic polynucleotide

SEQ ID NO: 70 - DNA, 180 bp, Artificial Sequence
  Synthetic polynucleotide
atcatctcaccttgcctcctgaaatagcgagaagctcacctgcaggcaaaccacagaagacaaaccacagatcgcaaaccacagagaccaaaccacagactacaaaccacagaactcaaaccacagatgccaaaccacagagtacaaaccacagaggcgcgccatgcttcatcagactct

SEQ ID NO: 71 - DNA, 180 bp, Artificial Sequence; identical to SEQ ID NO: 70
  Synthetic polynucleotide

SEQ ID NO: 72 - DNA, 156 bp, Artificial Sequence
  Synthetic polynucleotide
atcatctcaccttgcctcctgaggaaagaaatgccagacctgcaggtggaaataagatggaaatatcgtggaaatagactggaaatactatggaaataacttggaaatatgctggaaatagtatggaaataggcgcgccatgcttcatcagactct

SEQ ID NO: 73 - DNA, 156 bp, Artificial Sequence; identical to SEQ ID NO: 72
  Synthetic polynucleotide

SEQ ID NO: 74 - DNA, 188 bp, Artificial Sequence
  Synthetic polynucleotide
atcatctcaccttgcctcctggcactgatatactactgcctgcaggctaccatcaatcagactaccatcaatctcgctaccatcaatcgacctaccatcaatcctactaccatcaatcactctaccatcaatctgcctaccatcaatcgtactaccatcaatcggcgcgccatgcttcatcagactct

SEQ ID NO: 75 - DNA, 188 bp, Artificial Sequence; identical to SEQ ID NO: 74
  Synthetic polynucleotide

SEQ ID NO: 76 - DNA, 172 bp, Artificial Sequence
  Synthetic polynucleotide
atcatctcaccttgcctcctgatctagactcttcagatcctgcaggccagatgtcaagaccagatgtcatcgccagatgtcagacccagatgtcactaccagatgtcaactccagatgtcatgcccagatgtcagtaccagatgtcaggcgcgccatgcttcatcagactct

SEQ ID NO: 77 - DNA, 172 bp, Artificial Sequence; identical to SEQ ID NO: 76
  Synthetic polynucleotide

SEQ ID NO: 78 - DNA, 190 bp, Artificial Sequence
  Synthetic polynucleotide
atcatctcaccttgcctcctgctcgttatttcaaacgccctgcaggttgttacattgttgagattgttacattgttgtcgttgttacattgttggacttgttacattgttgctattgttacattgttgactttgttacattgttgtgcttgttacattgttggtaggcgcgccatgcttcatcagactct

SEQ ID NO: 79 - DNA, 190 bp, Artificial Sequence; identical to SEQ ID NO: 78
  Synthetic polynucleotide

SEQ ID NO: 80 - DNA, 191 bp, Artificial Sequence
  Synthetic polynucleotide
atcatctcaccttgcctcctgttcactcttgtcggaaacctgcaggaagattttacgaccttgagaaagattttacgaccttgtcgaagattttacgaccttggacaagattttacgaccttgctaaagattttacgaccttgactaagattttacgaccttgtgcggcgcgccatgcttcatcagactct

SEQ ID NO: 81 - DNA, 191 bp, Artificial Sequence; identical to SEQ ID NO: 80
  Synthetic polynucleotide

SEQ ID NO: 82 - DNA, 180 bp, Artificial Sequence
  Synthetic polynucleotide
atcatctcaccttgcctcctgctctctatagcacgacacctgcaggggtcgtaaaaaagaggtcgtaaaaatcgggtcgtaaaaagacggtcgtaaaaactaggtcgtaaaaaactggtcgtaaaaatgcggtcgtaaaaagtaggtcgtaaaaaggcgcgccatgcttcatcagactct

SEQ ID NO: 83 - DNA, 180 bp, Artificial Sequence; identical to SEQ ID NO: 82
  Synthetic polynucleotide

SEQ ID NO: 84 - DNA, 180 bp, Artificial Sequence
  Synthetic polynucleotide
atcatctcaccttgcctcctgtttgtcggtcatcaagccctgcaggagcctgaggcaagaagcctgaggcatcgagcctgaggcagacagcctgaggcactaagcctgaggcaactagcctgaggcatgcagcctgaggcagtaagcctgaggcaggcgcgccatgcttcatcagactct

SEQ ID NO: 85 - DNA, 180 bp, Artificial Sequence; identical to SEQ ID NO: 84
  Synthetic polynucleotide

SEQ ID NO: 86 - DNA, 197 bp, Artificial Sequence
  Synthetic polynucleotide
atcatctcaccttgcctcctggtgtagggaaatcagctcctgcaggcggccaccagggggcagacggccaccagggggctcgcggccaccagggggcgaccggccaccagggggcctacggccaccagggggcactcggccaccagggggctgccggccaccagggggcgtaggcgcgccatgcttcatcagactct

SEQ ID NO: 87 - DNA, 197 bp, Artificial Sequence; identical to SEQ ID NO: 86
  Synthetic polynucleotide

SEQ ID NO: 88 - DNA, 188 bp, Artificial Sequence
  Synthetic polynucleotide
atcatctcaccttgcctcctgagttgtccaacccgggtcctgcagggattacgtggcaagagattacgtggcatcggattacgtggcagacgattacgtggcactagattacgtggcaactgattacgtggcatgcgattacgtggcagtagattacgtggcaggcgcgccatgcttcatcagactct

SEQ ID NO: 89 - DNA, 188 bp, Artificial Sequence; identical to SEQ ID NO: 88
  Synthetic polynucleotide

SEQ ID NO: 90 - DNA, 156 bp, Artificial Sequence
  Synthetic polynucleotide
atcatctcaccttgcctcctgccctgcgatcctactagcctgcagggtgaccccagagtgacccctcggtgaccccgacgtgaccccctagtgaccccactgtgacccctgcgtgaccccgtagtgaccccggcgcgccatgcttcatcagactct

SEQ ID NO: 91 - DNA, 156 bp, Artificial Sequence; identical to SEQ ID NO: 90
  Synthetic polynucleotide

SEQ ID NO: 92 - DNA, 197 bp, Artificial Sequence
  Synthetic polynucleotide
atcatctcaccttgcctcctgtctatagcttccctccacctgcaggctgtccatggtgctgagactgtccatggtgctgtcgctgtccatggtgctggacctgtccatggtgctgctactgtccatggtgctgactctgtccatggtgctgtgcctgtccatggtgctggtaggcgcgccatgcttcatcagactct

SEQ ID NO: 93 - DNA, 197 bp, Artificial Sequence; identical to SEQ ID NO: 92
  Synthetic polynucleotide

SEQ ID NO: 94 - DNA, 191 bp, Artificial Sequence
  Synthetic polynucleotide
atcatctcaccttgcctcctgttggctcgaccctgatccctgcaggaaactacaattcccagaatgcagaaaactacaattcccagaatgctcgaaactacaattcccagaatgcgacaaactacaattcccagaatgcctaaaactacaattcccagaatgcactggcgcgccatgcttcatcagactct

SEQ ID NO: 95 - DNA, 191 bp, Artificial Sequence; identical to SEQ ID NO: 94
  Synthetic polynucleotide

SEQ ID NO: 96 - DNA, 172 bp, Artificial Sequence
  Synthetic polynucleotide
atcatctcaccttgcctcctgctacacgtcagtatccacctgcaggtgcctcagggagatgcctcagggtcgtgcctcaggggactgcctcagggctatgcctcagggacttgcctcagggtgctgcctcaggggtatgcctcagggggcgcgccatgcttcatcagactct

SEQ ID NO: 97 - DNA, 172 bp, Artificial Sequence; identical to SEQ ID NO: 96
  Synthetic polynucleotide

SEQ ID NO: 98 - DNA, 197 bp, Artificial Sequence
  Synthetic polynucleotide
atcatctcaccttgcctcctgttctagggccatttccacctgcaggaagtgaaagtgaaagagaaagtgaaagtgaaagtcgaagtgaaagtgaaaggacaagtgaaagtgaaagctaaagtgaaagtgaaagactaagtgaaagtgaaagtgcaagtgaaagtgaaaggtaggcgcgccatgcttcatcagactct

SEQ ID NO: 99 - DNA, 197 bp, Artificial Sequence; identical to SEQ ID NO: 98
  Synthetic polynucleotide

SEQ ID NO: 100 - DNA, 197 bp, Artificial Sequence
  Synthetic polynucleotide
atcatctcaccttgcctcctgtgccgagctcacagcttcctgcaggacccccccgggggggagaacccccccgggggggtcgacccccccggggggggacacccccccgggggggctaacccccccgggggggactacccccccgggggggtgcacccccccggggggggtaggcgcgccatgcttcatcagactct

SEQ ID NO: 101 - DNA, 197 bp, Artificial Sequence; identical to SEQ ID NO: 100
  Synthetic polynucleotide

SEQ ID NO: 102 - DNA, 180 bp, Artificial Sequence
  Synthetic polynucleotide
atcatctcaccttgcctcctgcctacgacgccttaatccctgcagggagacatgtccagagagacatgtcctcggagacatgtccgacgagacatgtccctagagacatgtccactgagacatgtcctgcgagacatgtccgtagagacatgtccggcgcgccatgcttcatcagactct

SEQ ID NO: 103 - DNA, 180 bp, Artificial Sequence; identical to SEQ ID NO: 102
  Synthetic polynucleotide

SEQ ID NO: 104 - DNA, 164 bp, Artificial Sequence
  Synthetic polynucleotide
atcatctcaccttgcctcctggaagttaccaggatatccctgcagggccatcttgagagccatcttgtcggccatcttggacgccatcttgctagccatcttgactgccatcttgtgcgccatcttggtagccatcttgggcgcgccatgcttcatcagactct

SEQ ID NO: 105 - DNA, 164 bp, Artificial Sequence; identical to SEQ ID NO: 104
  Synthetic polynucleotide

SEQ ID NO: 106 - DNA, 164 bp, Artificial Sequence
  Synthetic polynucleotide
atcatctcaccttgcctcctgcgcatcgatcaagggaacctgcaggttgacagctagattgacagcttcgttgacagctgacttgacagctctattgacagctactttgacagcttgcttgacagctgtattgacagctggcgcgccatgcttcatcagactct

SEQ ID NO: 107 - DNA, 164 bp, Artificial Sequence; identical to SEQ ID NO: 106
  Synthetic polynucleotide

SEQ ID NO: 108 - DNA, 156 bp, Artificial Sequence
  Synthetic polynucleotide
atcatctcaccttgcctcctgtaccaacgtcagttactcctgcaggacctagtgagaacctagtgtcgacctagtggacacctagtgctaacctagtgactacctagtgtgcacctagtggtaacctagtgggcgcgccatgcttcatcagactct

SEQ ID NO: 109 - DNA, 156 bp, Artificial Sequence; identical to SEQ ID NO: 108
  Synthetic polynucleotide

SEQ ID NO: 110 - DNA, 197 bp, Artificial Sequence
  Synthetic polynucleotide
atcatctcaccttgcctcctgatgctactgggtgggagcctgcaggaccatggacagcgccagaaccatggacagcgcctcgaccatggacagcgccgacaccatggacagcgccctaaccatggacagcgccactaccatggacagcgcctgcaccatggacagcgccgtaggcgcgccatgcttcatcagactct

SEQ ID NO: 111 - DNA, 197 bp, Artificial Sequence; identical to SEQ ID NO: 110
  Synthetic polynucleotide

SEQ ID NO: 112 - DNA, 172 bp, Artificial Sequence
  Synthetic polynucleotide
atcatctcaccttgcctcctgttgttacctaccctttacctgcaggatcaaggtcaagaatcaaggtcatcgatcaaggtcagacatcaaggtcactaatcaaggtcaactatcaaggtcatgcatcaaggtcagtaatcaaggtcaggcgcgccatgcttcatcagactct

SEQ ID NO: 113 - DNA, 172 bp, Artificial Sequence; identical to SEQ ID NO: 112
  Synthetic polynucleotide

SEQ ID NO: 114 - DNA, 190 bp, Artificial Sequence
  Synthetic polynucleotide
atcatctcaccttgcctcctgactgtggcaaccagccacctgcaggtggacacgtgacccagatggacacgtgaccctcgtggacacgtgacccgactggacacgtgacccctatggacacgtgacccacttggacacgtgaccctgctggacacgtgacccgtaggcgcgccatgcttcatcagactct

SEQ ID NO: 115 - DNA, 190 bp, Artificial Sequence; identical to SEQ ID NO: 114
  Synthetic polynucleotide

SEQ ID NO: 116 - DNA, 185 bp, Artificial Sequence
  Synthetic polynucleotide
atcatctcaccttgcctcctggaaatcatgggtatctgcctgcaggaatgttaagtggcttaagaaatgttaagtggcttatcgaatgttaagtggcttagacaatgttaagtggcttactaaatgttaagtggcttaactaatgttaagtggcttatgcggcgcgccatgcttcatcagactct

SEQ ID NO: 117 - DNA, 185 bp, Artificial Sequence; identical to SEQ ID NO: 116
  Synthetic polynucleotide

SEQ ID NO: 118 - DNA, 156 bp, Artificial Sequence
  Synthetic polynucleotide
atcatctcaccttgcctcctgatcttcgttgtgagtgtcctgcaggagtcacggagaagtcacggtcgagtcacgggacagtcacggctaagtcacggactagtcacggtgcagtcacgggtaagtcacggggcgcgccatgcttcatcagactct

SEQ ID NO: 119 - DNA, 156 bp, Artificial Sequence; identical to SEQ ID NO: 118
  Synthetic polynucleotide

SEQ ID NO: 120 - DNA, 172 bp, Artificial Sequence
  Synthetic polynucleotide
atcatctcaccttgcctcctgaggtgtaggaaagagctcctgcaggttaattgcttagattaattgctttcgttaattgcttgacttaattgcttctattaattgcttactttaattgctttgcttaattgcttgtattaattgcttggcgcgccatgcttcatcagactct

SEQ ID NO: 121 - DNA, 172 bp, Artificial Sequence; identical to SEQ ID NO: 120
  Synthetic polynucleotide

SEQ ID NO: 122 - DNA, 200 bp, Artificial Sequence
  Synthetic polynucleotide
atcatctcaccttgcctcctgaagtggaaatagacgtgcctgcaggtgaggtcaaaaaagttcagagatgaggtcaaaaaagttcagtcgtgaggtcaaaaaagttcaggactgaggtcaaaaaagttcagctatgaggtcaaaaaagttcagacttgaggtcaaaaaagttcagggcgcgccatgcttcatcagactct

SEQ ID NO: 123 - DNA, 200 bp, Artificial Sequence; identical to SEQ ID NO: 122
  Synthetic polynucleotide

SEQ ID NO: 124 - DNA, 156 bp, Artificial Sequence
  Synthetic polynucleotide
atcatctcaccttgcctcctgctgacaatgtggcaacgcctgcaggagtcacgcagaagtcacgctcgagtcacgcgacagtcacgcctaagtcacgcactagtcacgctgcagtcacgcgtaagtcacgcggcgcgccatgcttcatcagactct

SEQ ID NO: 125 - DNA, 156 bp, Artificial Sequence; identical to SEQ ID NO: 124
  Synthetic polynucleotide

SEQ ID NO: 126 - DNA, 164 bp, Artificial Sequence
  Synthetic polynucleotide
atcatctcaccttgcctcctggccatctcttcaccaagcctgcagggtgacctttagagtgaccttttcggtgacctttgacgtgacctttctagtgacctttactgtgaccttttgcgtgacctttgtagtgacctttggcgcgccatgcttcatcagactct

SEQ ID NO: 127 - DNA, 164 bp, Artificial Sequence; identical to SEQ ID NO: 126
  Synthetic polynucleotide

SEQ ID NO: 128 - DNA, 172 bp, Artificial Sequence
  Synthetic polynucleotide
atcatctcaccttgcctcctggtccagtcgcctttaggcctgcagggtggggggggagagtggggggggtcggtgggggggggacgtggggggggctagtggggggggactgtggggggggtgcgtgggggggggtagtggggggggggcgcgccatgcttcatcagactct

SEQ ID NO: 129 - DNA, 172 bp, Artificial Sequence; identical to SEQ ID NO: 128
  Synthetic polynucleotide

SEQ ID NO: 130 - DNA, 196 bp, Artificial Sequence
  Synthetic polynucleotide
atcatctcaccttgcctcctgccctcggagcgtttatccctgcagggaccacgtgactgagagaccacgtgactgtcggaccacgtgactggacgaccacgtgactgctagaccacgtgactgactgaccacgtgactgtgcgaccacgtgactggtagaccacgtgactgggcgcgccatgcttcatcagactct

SEQ ID NO: 131 - DNA, 196 bp, Artificial Sequence; identical to SEQ ID NO: 130
  Synthetic polynucleotide

SEQ ID NO: 132 - DNA, 191 bp, Artificial Sequence
  Synthetic polynucleotide
atcatctcaccttgcctcctgatcgctaacgagcggtccctgcaggtgccactaattagtgtaagatgccactaattagtgtatcgtgccactaattagtgtagactgccactaattagtgtactatgccactaattagtgtaacttgccactaattagtgtatgcggcgcgccatgcttcatcagactct

SEQ ID NO: 133 - DNA, 191 bp, Artificial Sequence; identical to SEQ ID NO: 132
  Synthetic polynucleotide

SEQ ID NO: 134 - DNA, 156 bp, Artificial Sequence
  Synthetic polynucleotide
atcatctcaccttgcctcctgtaggttccgttccaccacctgcaggttcattgaagattcattgatcgttcattgagacttcattgactattcattgaactttcattgatgcttcattgagtattcattgaggcgcgccatgcttcatcagactct

SEQ ID NO: 135 - DNA, 156 bp, Artificial Sequence; identical to SEQ ID NO: 134
  Synthetic polynucleotide

SEQ ID NO: 136 - DNA, 188 bp, Artificial Sequence
  Synthetic polynucleotide
atcatctcaccttgcctcctgacaggaaatcctaatgacctgcaggttattgatttttagattattgattttttcgttattgatttttgacttattgatttttctattattgatttttactttattgattttttgcttattgatttttgtattattgatttttggcgcgccatgcttcatcagactct

SEQ ID NO: 137 - DNA, 188 bp, Artificial Sequence; identical to SEQ ID NO: 136
  Synthetic polynucleotide

SEQ ID NO: 138 - DNA, 172 bp, Artificial Sequence
  Synthetic polynucleotide
atcatctcaccttgcctcctgcatcacactcattcgagcctgcaggactaattaacagaactaattaactcgactaattaacgacactaattaacctaactaattaacactactaattaactgcactaattaacgtaactaattaacggcgcgccatgcttcatcagactct

SEQ ID NO: 139 - DNA, 172 bp, Artificial Sequence; identical to SEQ ID NO: 138
  Synthetic polynucleotide

SEQ ID NO: 140 - DNA, 188 bp, Artificial Sequence
  Synthetic polynucleotide
atcatctcaccttgcctcctggggtcatttccatacatcctgcaggcagtttcattttagacagtttcatttttcgcagtttcattttgaccagtttcattttctacagtttcattttactcagtttcatttttgccagtttcattttgtacagtttcattttggcgcgccatgcttcatcagactct

SEQ ID NO: 141 - DNA, 188 bp, Artificial Sequence; identical to SEQ ID NO: 140
  Synthetic polynucleotide

SEQ ID NO: 142 - DNA, 197 bp, Artificial Sequence
  Synthetic polynucleotide
atcatctcaccttgcctcctgagcggacttggacctaccctgcaggattggtgcgtgacggagaattggtgcgtgacggtcgattggtgcgtgacgggacattggtgcgtgacggctaattggtgcgtgacggactattggtgcgtgacggtgcattggtgcgtgacgggtaggcgcgccatgcttcatcagactct

SEQ ID NO: 143 - DNA, 197 bp, Artificial Sequence; identical to SEQ ID NO: 142
  Synthetic polynucleotide

SEQ ID NO: 144 - DNA, 197 bp, Artificial Sequence
  Synthetic polynucleotide
atcatctcaccttgcctcctgagactacttaaggaaggcctgcaggccggcaggtgtccgcagaccggcaggtgtccgctcgccggcaggtgtccgcgacccggcaggtgtccgcctaccggcaggtgtccgcactccggcaggtgtccgctgcccggcaggtgtccgcgtaggcgcgccatgcttcatcagactct

SEQ ID NO: 145 - DNA, 197 bp, Artificial Sequence; identical to SEQ ID NO: 144
  Synthetic polynucleotide

SEQ ID NO: 146 - DNA, 185 bp, Artificial Sequence
  Synthetic polynucleotide
atcatctcaccttgcctcctgtgtgggttatgaactgccctgcagggtcattcgtaatgagcagagtcattcgtaatgagctcggtcattcgtaatgagcgacgtcattcgtaatgagcctagtcattcgtaatgagcactgtcattcgtaatgagctgcggcgcgccatgcttcatcagactct

SEQ ID NO: 147 - DNA, 185 bp, Artificial Sequence; identical to SEQ ID NO: 146
  Synthetic polynucleotide

SEQ ID NO: 148 - DNA, 156 bp, Artificial Sequence
  Synthetic polynucleotide
atcatctcaccttgcctcctggtataatcgcagagcctcctgcaggaaacgtagagaaaacgtagtcgaaacgtaggacaaacgtagctaaaacgtagactaaacgtagtgcaaacgtaggtaaaacgtagggcgcgccatgcttcatcagactct

SEQ ID NO: 149 - DNA, 156 bp, Artificial Sequence; identical to SEQ ID NO: 148
  Synthetic polynucleotide

SEQ ID NO: 150 - DNA, 196 bp, Artificial Sequence
  Synthetic polynucleotide
atcatctcaccttgcctcctgatgacatctcttagtggcctgcaggttttatacatgttagattttatacatgtttcgttttatacatgttgacttttatacatgttctattttatacatgttactttttatacatgtttgcttttatacatgttgtattttatacatgttggcgcgccatgcttcatcagactct

SEQ ID NO: 151 - DNA, 196 bp, Artificial Sequence; identical to SEQ ID NO: 150
  Synthetic polynucleotide

SEQ ID NO: 152 - DNA, 197 bp, Artificial Sequence
  Synthetic polynucleotide
atcatctcaccttgcctcctgatcctatttatggcccacctgcaggttaggacataatgttcccagattaggacataatgttccctcgttaggacataatgttcccgacttaggacataatgttcccctattaggacataatgttcccactttaggacataatgttccctgcggcgcgccatgcttcatcagactct

SEQ ID NO: 153 - DNA, 197 bp, Artificial Sequence; identical to SEQ ID NO: 152
  Synthetic polynucleotide

SEQ ID NO: 154 - DNA, 190 bp, Artificial Sequence
  Synthetic polynucleotide
atcatctcaccttgcctcctgtgataagccttggcaaccctgcaggaaatgggcgtggccagaaaatgggcgtggcctcgaaatgggcgtggccgacaaatgggcgtggccctaaaatgggcgtggccactaaatgggcgtggcctgcaaatgggcgtggccgtaggcgcgccatgcttcatcagactct

SEQ ID NO: 155 - DNA, 190 bp, Artificial Sequence; identical to SEQ ID NO: 154
  Synthetic polynucleotide

SEQ ID NO: 156 - DNA, 197 bp, Artificial Sequence
  Synthetic polynucleotide
atcatctcaccttgcctcctgaacgactggtcatggcacctgcaggaatcaatagattggaagaaatcaatagattggatcgaatcaatagattggagacaatcaatagattggactaaatcaatagattggaactaatcaatagattggatgcaatcaatagattggagtaggcgcgccatgcttcatcagactct

SEQ ID NO: 157 - DNA, 197 bp, Artificial Sequence; identical to SEQ ID NO: 156
  Synthetic polynucleotide

SEQ ID NO: 158 - DNA, 172 bp, Artificial Sequence
  Synthetic polynucleotide
atcatctcaccttgcctcctgagagtcgggtttcaacacctgcaggactaattaagagaactaattaagtcgactaattaaggacactaattaagctaactaattaagactactaattaagtgcactaattaaggtaactaattaagggcgcgccatgcttcatcagactct

SEQ ID NO: 159 - DNA, 172 bp, Artificial Sequence; identical to SEQ ID NO: 158
  Synthetic polynucleotide

SEQ ID NO: 160 - DNA, 180 bp, Artificial Sequence
  Synthetic polynucleotide
atcatctcaccttgcctcctgaaatatcatatccgaggcctgcaggtaatctaattaagataatctaattatcgtaatctaattagactaatctaattactataatctaattaacttaatctaattatgctaatctaattagtataatctaattaggcgcgccatgcttcatcagactct

SEQ ID NO: 161 - DNA, 180 bp, Artificial Sequence; identical to SEQ ID NO: 160
  Synthetic polynucleotide

SEQ ID NO: 162 - DNA, 185 bp, Artificial Sequence
  Synthetic polynucleotide
atcatctcaccttgcctcctggaggtagtcttcggctacctgcaggctgagctaattaccgtagactgagctaattaccgttcgctgagctaattaccgtgacctgagctaattaccgtctactgagctaattaccgtactctgagctaattaccgttgcggcgcgccatgcttcatcagactct

SEQ ID NO: 163 - DNA, 185 bp, Artificial Sequence; identical to SEQ ID NO: 162
  Synthetic polynucleotide

SEQ ID NO: 164 - DNA, 197 bp, Artificial Sequence
  Synthetic polynucleotide
atcatctcaccttgcctcctgcgtgtgtggaataagctcctgcaggatgccacgcccctttttgagaatgccacgcccctttttgtcgatgccacgcccctttttggacatgccacgcccctttttgctaatgccacgcccctttttgactatgccacgcccctttttgtgcggcgcgccatgcttcatcagactct

SEQ ID NO: 165 - DNA, 197 bp, Artificial Sequence; identical to SEQ ID NO: 164
  Synthetic polynucleotide

SEQ ID NO: 166 - DNA, 164 bp, Artificial Sequence
  Synthetic polynucleotide
atcatctcaccttgcctcctgattacggtctcttaaaccctgcaggactagagggagaactagagggtcgactagaggggacactagagggctaactagagggactactagagggtgcactagaggggtaactagagggggcgcgccatgcttcatcagactct

SEQ ID NO: 167 - DNA, 164 bp, Artificial Sequence; identical to SEQ ID NO: 166
  Synthetic polynucleotide

SEQ ID NO: 168 - DNA, 197 bp, Artificial Sequence
  Synthetic polynucleotide
atcatctcaccttgcctcctgcgggataatggaccattcctgcagggtgacctacttcctggcaagagtgacctacttcctggcatcggtgacctacttcctggcagacgtgacctacttcctggcactagtgacctacttcctggcaactgtgacctacttcctggcatgcggcgcgccatgcttcatcagactct

SEQ ID NO: 169 - DNA, 197 bp, Artificial Sequence; identical to SEQ ID NO: 168
  Synthetic polynucleotide

SEQ ID NO: 170 - DNA, 185 bp, Artificial Sequence
  Synthetic polynucleotide
atcatctcaccttgcctcctgcagcggcatacacacttcctgcaggtttaaccaattaacctagatttaaccaattaaccttcgtttaaccaattaacctgactttaaccaattaacctctatttaaccaattaacctacttttaaccaattaaccttgcggcgcgccatgcttcatcagactct

SEQ ID NO: 171 - DNA, 185 bp, Artificial Sequence; identical to SEQ ID NO: 170
  Synthetic polynucleotide

SEQ ID NO: 172 - DNA, 172 bp, Artificial Sequence
  Synthetic polynucleotide
atcatctcaccttgcctcctggaagtattatccaacgacctgcaggactaattaaaagaactaattaaatcgactaattaaagacactaattaaactaactaattaaaactactaattaaatgcactaattaaagtaactaattaaaggcgcgccatgcttcatcagactct

SEQ ID NO: 173 - DNA, 172 bp, Artificial Sequence; identical to SEQ ID NO: 172
  Synthetic polynucleotide

SEQ ID NO: 174 - DNA, 140 bp, Artificial Sequence
  Synthetic polynucleotide
atcatctcaccttgcctcctggtaccttaaccatgatacctgcagggtcatgagagtcatgtcggtcatggacgtcatgctagtcatgactgtcatgtgcgtcatggtagtcatgggcgcgccatgcttcatcagactct

SEQ ID NO: 175 - DNA, 140 bp, Artificial Sequence; identical to SEQ ID NO: 174
  Synthetic polynucleotide

SEQ ID NO: 176 - DNA, 200 bp, Artificial Sequence
  Synthetic polynucleotide
atcatctcaccttgcctcctgccacatgaacaggttcgcctgcaggacgaagccattaagccctcagaacgaagccattaagccctctcgacgaagccattaagccctcgacacgaagccattaagccctcctaacgaagccattaagccctcactacgaagccattaagccctcggcgcgccatgcttcatcagactct

SEQ ID NO: 177 - DNA, 200 bp, Artificial Sequence; identical to SEQ ID NO: 176
  Synthetic polynucleotide

SEQ ID NO: 178 - DNA, 180 bp, Artificial Sequence
  Synthetic polynucleotide
atcatctcaccttgcctcctgataaatgcaacttacgccctgcaggagataagataaagaagataagataatcgagataagataagacagataagataactaagataagataaactagataagataatgcagataagataagtaagataagataaggcgcgccatgcttcatcagactct

SEQ ID NO: 179 - DNA, 180 bp, Artificial Sequence; identical to SEQ ID NO: 178
  Synthetic polynucleotide

SEQ ID NO: 180 - DNA, 200 bp, Artificial Sequence
  Synthetic polynucleotide
atcatctcaccttgcctcctgaatgtgtagccgttgctcctgcaggctgaacttttttgacctcaagactgaacttttttgacctcatcgctgaacttttttgacctcagacctgaacttttttgacctcactactgaacttttttgacctcaactctgaacttttttgacctcaggcgcgccatgcttcatcagactct

SEQ ID NO: 181 - DNA, 200 bp, Artificial Sequence; identical to SEQ ID NO: 180
  Synthetic polynucleotide

SEQ ID NO: 182 - DNA, 172 bp, Artificial Sequence
  Synthetic polynucleotide
atcatctcaccttgcctcctgattatcccatcacctcccctgcaggggagcaggtgagaggagcaggtgtcgggagcaggtggacggagcaggtgctaggagcaggtgactggagcaggtgtgcggagcaggtggtaggagcaggtgggcgcgccatgcttcatcagactct

SEQ ID NO: 183 - DNA, 172 bp, Artificial Sequence; identical to SEQ ID NO: 182
  Synthetic polynucleotide

SEQ ID NO: 184 - DNA, 200 bp, Artificial Sequence
  Synthetic polynucleotide
atcatctcaccttgcctcctgttggttccgattgggagcctgcaggtaactaggttagtaggtcaagataactaggttagtaggtcatcgtaactaggttagtaggtcagactaactaggttagtaggtcactataactaggttagtaggtcaacttaactaggttagtaggtcaggcgcgccatgcttcatcagactct

SEQ ID NO: 185 - DNA, 200 bp, Artificial Sequence; identical to SEQ ID NO: 184
  Synthetic polynucleotide

SEQ ID NO: 186 - DNA, 172 bp, Artificial Sequence
  Synthetic polynucleotide
atcatctcaccttgcctcctgtgtgaatcagagatcaacctgcaggaggggtcacgagaaggggtcacgtcgaggggtcacggacaggggtcacgctaaggggtcacgactaggggtcacgtgcaggggtcacggtaaggggtcacgggcgcgccatgcttcatcagactct

SEQ ID NO: 187 - DNA, 172 bp, Artificial Sequence; identical to SEQ ID NO: 186
  Synthetic polynucleotide

SEQ ID NO: 188 - DNA, 188 bp, Artificial Sequence
  Synthetic polynucleotide
atcatctcaccttgcctcctgtgatcacgctgagcgatcctgcaggtgccctagggcaagatgccctagggcatcgtgccctagggcagactgccctagggcactatgccctagggcaacttgccctagggcatgctgccctagggcagtatgccctagggcaggcgcgccatgcttcatcagactct

SEQ ID NO: 189 - DNA, 188 bp, Artificial Sequence; identical to SEQ ID NO: 188
  Synthetic polynucleotide

SEQ ID NO: 190 - DNA, 185 bp, Artificial Sequence
  Synthetic polynucleotide
atcatctcaccttgcctcctgcacatatgactgccatgcctgcagggtgaacacctgttaatagagtgaacacctgttaattcggtgaacacctgttaatgacgtgaacacctgttaatctagtgaacacctgttaatactgtgaacacctgttaattgcggcgcgccatgcttcatcagactct

SEQ ID NO: 191 - DNA, 185 bp, Artificial Sequence; identical to SEQ ID NO: 190
  Synthetic polynucleotide

SEQ ID NO: 192 - DNA, 156 bp, Artificial Sequence
  Synthetic polynucleotide
atcatctcaccttgcctcctggccagtgcaatggcgtacctgcaggttaatgacagattaatgactcgttaatgacgacttaatgacctattaatgacactttaatgactgcttaatgacgtattaatgacggcgcgccatgcttcatcagactct

SEQ ID NO: 193 - DNA, 156 bp, Artificial Sequence; identical to SEQ ID NO: 192
  Synthetic polynucleotide

SEQ ID NO: 194 - DNA, 197 bp, Artificial Sequence
  Synthetic polynucleotide
atcatctcaccttgcctcctgttggtaacgattgccgacctgcaggcccaggtcaccgtgacctagacccaggtcaccgtgaccttcgcccaggtcaccgtgacctgaccccaggtcaccgtgacctctacccaggtcaccgtgacctactcccaggtcaccgtgaccttgcggcgcgccatgcttcatcagactct

SEQ ID NO: 195 - DNA, 197 bp, Artificial Sequence; identical to SEQ ID NO: 194
  Synthetic polynucleotide

SEQ ID NO: 196 - DNA, 196 bp, Artificial Sequence
  Synthetic polynucleotide
atcatctcaccttgcctcctgaggacgtgctgggtaaccctgcaggggggggggggccaagaggggggggggccatcgggggggggggccagacggggggggggccactaggggggggggccaactggggggggggccatgcggggggggggccagtaggggggggggccaggcgcgccatgcttcatcagactct

SEQ ID NO: 197 - DNA, 196 bp, Artificial Sequence; identical to SEQ ID NO: 196
  Synthetic polynucleotide

SEQ ID NO: 198 - DNA, 191 bp, Artificial Sequence
  Synthetic polynucleotide
atcatctcaccttgcctcctgcgcactctgatgtaaggcctgcaggttcagcaccatggacagcgccagattcagcaccatggacagcgcctcgttcagcaccatggacagcgccgacttcagcaccatggacagcgccctattcagcaccatggacagcgccactggcgcgccatgcttcatcagactct

SEQ ID NO: 199 - DNA, 191 bp, Artificial Sequence; identical to SEQ ID NO: 198
  Synthetic polynucleotide

SEQ ID NO: 200 - DNA, 180 bp, Artificial Sequence
  Synthetic polynucleotide
atcatctcaccttgcctcctgggcctaaatcttctttccctgcagggggcactacttagagggcactactttcggggcactacttgacgggcactacttctagggcactacttactgggcactactttgcgggcactacttgtagggcactacttggcgcgccatgcttcatcagactct

SEQ ID NO: 201 - DNA, 180 bp, Artificial Sequence; identical to SEQ ID NO: 200
  Synthetic polynucleotide

SEQ ID NO: 202 - DNA, 197 bp, Artificial Sequence
  Synthetic polynucleotide
atcatctcaccttgcctcctgccttgagcggctttctacctgcaggaatttgattgatgtgagaaatttgattgatgtgtcgaatttgattgatgtggacaatttgattgatgtgctaaatttgattgatgtgactaatttgattgatgtgtgcaatttgattgatgtggtaggcgcgccatgcttcatcagactct

SEQ ID NO: 203 - DNA, 197 bp, Artificial Sequence; identical to SEQ ID NO: 202
  Synthetic polynucleotide

SEQ ID NO: 204 - DNA, 172 bp, Artificial Sequence
  Synthetic polynucleotide
atcatctcaccttgcctcctggcacagtgccaatcttccctgcaggaaattttcctagaaaattttccttcgaaattttcctgacaaattttcctctaaaattttcctactaaattttccttgcaaattttcctgtaaaattttcctggcgcgccatgcttcatcagactct

SEQ ID NO: 205 - DNA, 172 bp, Artificial Sequence; identical to SEQ ID NO: 204
  Synthetic polynucleotide

SEQ ID NO: 206 - DNA, 148 bp, Artificial Sequence
  Synthetic polynucleotide
atcatctcaccttgcctcctggttcaactgttctgtaacctgcaggtgaccttagatgacctttcgtgaccttgactgaccttctatgaccttacttgacctttgctgaccttgtatgaccttggcgcgccatgcttcatcagactct

SEQ ID NO: 207 - DNA, 148 bp, Artificial Sequence; identical to SEQ ID NO: 206
  Synthetic polynucleotide

SEQ ID NO: 208 - DNA, 172 bp, Artificial Sequence
  Synthetic polynucleotide
atcatctcaccttgcctcctgatcgacaagagggcgagcctgcaggcagtcaagcgagacagtcaagcgtcgcagtcaagcggaccagtcaagcgctacagtcaagcgactcagtcaagcgtgccagtcaagcggtacagtcaagcgggcgcgccatgcttcatcagactct

SEQ ID NO: 209 - DNA, 172 bp, Artificial Sequence; identical to SEQ ID NO: 208
  Synthetic polynucleotide

SEQ ID NO: 210 - DNA, 185 bp, Artificial Sequence
  Synthetic polynucleotide
atcatctcaccttgcctcctgggataagtgtttaccggcctgcaggggtacaatctgttctgagaggtacaatctgttctgtcgggtacaatctgttctggacggtacaatctgttctgctaggtacaatctgttctgactggtacaatctgttctgtgcggcgcgccatgcttcatcagactct

SEQ ID NO: 211 - DNA, 185 bp, Artificial Sequence; identical to SEQ ID NO: 210
  Synthetic polynucleotide

SEQ ID NO: 212 - DNA, 180 bp, Artificial Sequence
  Synthetic polynucleotide
atcatctcaccttgcctcctgggaatcaacgccttcatcctgcaggacaggaagtggagaacaggaagtggtcgacaggaagtgggacacaggaagtggctaacaggaagtggactacaggaagtggtgcacaggaagtgggtaacaggaagtggggcgcgccatgcttcatcagactct

SEQ ID NO: 213 - DNA, 180 bp, Artificial Sequence; identical to SEQ ID NO: 212
  Synthetic polynucleotide

SEQ ID NO: 214 - DNA, 164 bp, Artificial Sequence
  Synthetic polynucleotide
atcatctcaccttgcctcctgatgttgcccactgcatgcctgcaggccaatcagcagaccaatcagctcgccaatcagcgacccaatcagcctaccaatcagcactccaatcagctgcccaatcagcgtaccaatcagcggcgcgccatgcttcatcagactct

SEQ ID NO: 215 - DNA, 164 bp, Artificial Sequence; identical to SEQ ID NO: 214
  Synthetic polynucleotide

SEQ ID NO: 216 - DNA, 172 bp, Artificial Sequence
  Synthetic polynucleotide
atcatctcaccttgcctcctgacaatacgtgaacgagccctgcaggaagaggaagtagaaagaggaagttcgaagaggaagtgacaagaggaagtctaaagaggaagtactaagaggaagttgcaagaggaagtgtaaagaggaagtggcgcgccatgcttcatcagactct

SEQ ID NO: 217 - DNA, 172 bp, Artificial Sequence; identical to SEQ ID NO: 216
  Synthetic polynucleotide

SEQ ID NO: 218 - DNA, 190 bp, Artificial Sequence
  Synthetic polynucleotide
atcatctcaccttgcctcctggtattcgatgacgcttgcctgcaggggggtgacgtcatcagaggggtgacgtcatctcgggggtgacgtcatcgacggggtgacgtcatcctaggggtgacgtcatcactggggtgacgtcatctgcggggtgacgtcatcgtaggcgcgccatgcttcatcagactct

SEQ ID NO: 219 - DNA, 190 bp, Artificial Sequence; identical to SEQ ID NO: 218
  Synthetic polynucleotide

SEQ ID NO: 220 - DNA, 197 bp, Artificial Sequence
  Synthetic polynucleotide
atcatctcaccttgcctcctgccttcctggtcatggaccctgcaggcatttcccggaaaccagacatttcccggaaacctcgcatttcccggaaaccgaccatttcccggaaaccctacatttcccggaaaccactcatttcccggaaacctgccatttcccggaaaccgtaggcgcgccatgcttcatcagactct

SEQ ID NO: 221 - DNA, 197 bp, Artificial Sequence; identical to SEQ ID NO: 220
  Synthetic polynucleotide

SEQ ID NO: 222 - DNA, 185 bp, Artificial Sequence
  Synthetic polynucleotide
atcatctcaccttgcctcctggaccgtctatatctgggcctgcaggtataattataatattcagatataattataatattctcgtataattataatattcgactataattataatattcctatataattataatattcacttataattataatattctgcggcgcgccatgcttcatcagactct

SEQ ID NO: 223 - DNA, 185 bp, Artificial Sequence; identical to SEQ ID NO: 222
  Synthetic polynucleotide

SEQ ID NO: 224 - DNA, 191 bp, Artificial Sequence
  Synthetic polynucleotide
atcatctcaccttgcctcctgagatcctgggtaagaaccctgcaggttttcctttgatctataagattttcctttgatctatatcgttttcctttgatctatagacttttcctttgatctatactattttcctttgatctataactttttcctttgatctatatgcggcgcgccatgcttcatcagactct

SEQ ID NO: 225 - DNA, 191 bp, Artificial Sequence; identical to SEQ ID NO: 224
  Synthetic polynucleotide

SEQ ID NO: 226 - DNA, 172 bp, Artificial Sequence
  Synthetic polynucleotide
atcatctcaccttgcctcctgttggcgtacctaagcgtcctgcaggtttttattacagatttttattactcgtttttattacgactttttattacctatttttattacacttttttattactgctttttattacgtatttttattacggcgcgccatgcttcatcagactct

SEQ ID NO: 227 - DNA, 172 bp, Artificial Sequence; identical to SEQ ID NO: 226
  Synthetic polynucleotide

SEQ ID NO: 228 - DNA, 190 bp, Artificial Sequence
  Synthetic polynucleotide
atcatctcaccttgcctcctgggaatacctttgttaaccctgcagggcccctcccccaccagagcccctcccccacctcggcccctcccccaccgacgcccctcccccaccctagcccctcccccaccactgcccctcccccacctgcgcccctcccccaccgtaggcgcgccatgcttcatcagactct

SEQ ID NO: 229 - DNA, 190 bp, Artificial Sequence; identical to SEQ ID NO: 228
  Synthetic polynucleotide

SEQ ID NO: 230 - DNA, 185 bp, Artificial Sequence
  Synthetic polynucleotide
atcatctcaccttgcctcctgagaatgccatccacccgcctgcaggtgaacccttgacccctagatgaacccttgaccccttcgtgaacccttgacccctgactgaacccttgacccctctatgaacccttgacccctacttgaacccttgaccccttgcggcgcgccatgcttcatcagactct

SEQ ID NO: 231 - DNA, 185 bp, Artificial Sequence; identical to SEQ ID NO: 230
  Synthetic polynucleotide

SEQ ID NO: 232 - DNA, 148 bp, Artificial Sequence
  Synthetic polynucleotide
atcatctcaccttgcctcctgcgagcataatctccgatcctgcaggggtatcaagaggtatcatcgggtatcagacggtatcactaggtatcaactggtatcatgcggtatcagtaggtatcaggcgcgccatgcttcatcagactct

SEQ ID NO: 233 - DNA, 148 bp, Artificial Sequence; identical to SEQ ID NO: 232
  Synthetic polynucleotide

SEQ ID NO: 234 - DNA, 197 bp, Artificial Sequence
  Synthetic polynucleotide
atcatctcaccttgcctcctgtaagctgcgtcattgaacctgcagggtttgttttgccagaagagtttgttttgccagatcggtttgttttgccagagacgtttgttttgccagactagtttgttttgccagaactgtttgttttgccagatgcgtttgttttgccagagtaggcgcgccatgcttcatcagactct

SEQ ID NO: 235 - DNA, 197 bp, Artificial Sequence; identical to SEQ ID NO: 234
  Synthetic polynucleotide

SEQ ID NO: 236 - DNA, 164 bp, Artificial Sequence
  Synthetic polynucleotide
atcatctcaccttgcctcctgagaatcctcctaaataccctgcaggtgcacctggagatgcacctggtcgtgcacctgggactgcacctggctatgcacctggacttgcacctggtgctgcacctgggtatgcacctggggcgcgccatgcttcatcagactct

SEQ ID NO: 237 - DNA, 164 bp, Artificial Sequence; identical to SEQ ID NO: 236
  Synthetic polynucleotide

SEQ ID NO: 238 - DNA, 191 bp, Artificial Sequence
  Synthetic polynucleotide
atcatctcaccttgcctcctggtacgtcaacgctacgtcctgcagggaacaataccattgttcagagaacaataccattgttctcggaacaataccattgttcgacgaacaataccattgttcctagaacaataccattgttcactgaacaataccattgttctgcggcgcgccatgcttcatcagactct

SEQ ID NO: 239 - DNA, 191 bp, Artificial Sequence; identical to SEQ ID NO: 238
  Synthetic polynucleotide

SEQ ID NO: 240 - DNA, 185 bp, Artificial Sequence
  Synthetic polynucleotide
atcatctcaccttgcctcctgggcttgccgcctgtatacctgcagggcccgtttcgcgccaaagagcccgtttcgcgccaatcggcccgtttcgcgccaagacgcccgtttcgcgccaactagcccgtttcgcgccaaactgcccgtttcgcgccaatgcggcgcgccatgcttcatcagactct

SEQ ID NO: 241 - DNA, 185 bp, Artificial Sequence; identical to SEQ ID NO: 240
  Synthetic polynucleotide

SEQ ID NO: 242 - DNA, 140 bp, Artificial Sequence
  Synthetic polynucleotide
atcatctcaccttgcctcctggcagatcactgaggttccctgcaggtccccaagatccccatcgtccccagactccccactatccccaacttccccatgctccccagtatccccaggcgcgccatgcttcatcagactct

SEQ ID NO: 243 - DNA, 140 bp, Artificial Sequence; identical to SEQ ID NO: 242
  Synthetic polynucleotide

SEQ ID NO: 244 - DNA, 172 bp, Artificial Sequence
  Synthetic polynucleotide
atcatctcaccttgcctcctgaatagacgcctattgagcctgcaggccttatctgtagaccttatctgttcgccttatctgtgacccttatctgtctaccttatctgtactccttatctgttgcccttatctgtgtaccttatctgtggcgcgccatgcttcatcagactct

SEQ ID NO: 245 - DNA, 172 bp, Artificial Sequence; identical to SEQ ID NO: 244
  Synthetic polynucleotide

SEQ ID NO: 246 - DNA, 156 bp, Artificial Sequence
  Synthetic polynucleotide
atcatctcaccttgcctcctgcttcttactttctaggtcctgcaggctaggtcaagactaggtcatcgctaggtcagacctaggtcactactaggtcaactctaggtcatgcctaggtcagtactaggtcaggcgcgccatgcttcatcagactct

SEQ ID NO: 247 - DNA, 156 bp, Artificial Sequence; identical to SEQ ID NO: 246
  Synthetic polynucleotide

SEQ ID NO: 248 - DNA, 191 bp, Artificial Sequence
  Synthetic polynucleotide
atcatctcaccttgcctcctgacagtccgtactgtcgccctgcaggcgcgttaattaattaccagacgcgttaattaattacctcgcgcgttaattaattaccgaccgcgttaattaattaccctacgcgttaattaattaccactcgcgttaattaattacctgcggcgcgccatgcttcatcagactct

SEQ ID NO: 249 - DNA, 191 bp, Artificial Sequence; identical to SEQ ID NO: 248
  Synthetic polynucleotide

SEQ ID NO: 250 - DNA, 156 bp, Artificial Sequence
  Synthetic polynucleotide
atcatctcaccttgcctcctgacaacttcctggccagtcctgcaggtccccactagatccccacttcgtccccactgactccccactctatccccactacttccccacttgctccccactgtatccccactggcgcgccatgcttcatcagactct

SEQ ID NO: 251 - DNA, 156 bp, Artificial Sequence; identical to SEQ ID NO: 250
  Synthetic polynucleotide

SEQ ID NO: 252 - DNA, 190 bp, Artificial Sequence
  Synthetic polynucleotide
atcatctcaccttgcctcctggatgcagtcatacatggcctgcaggtacttccgctttttagatacttccgcttttttcgtacttccgctttttgactacttccgctttttctatacttccgctttttacttacttccgcttttttgctacttccgctttttgtaggcgcgccatgcttcatcagactct

SEQ ID NO: 253 - DNA, 190 bp, Artificial Sequence; identical to SEQ ID NO: 252
  Synthetic polynucleotide

SEQ ID NO: 254 - DNA, 172 bp, Artificial Sequence
  Synthetic polynucleotide
atcatctcaccttgcctcctgtaggcacccgttatgtccctgcaggccttatctgcagaccttatctgctcgccttatctgcgacccttatctgcctaccttatctgcactccttatctgctgcccttatctgcgtaccttatctgcggcgcgccatgcttcatcagactct

SEQ ID NO: 255 - DNA, 172 bp, Artificial Sequence; identical to SEQ ID NO: 254
  Synthetic polynucleotide

SEQ ID NO: 256 - DNA, 172 bp, Artificial Sequence
  Synthetic polynucleotide
atcatctcaccttgcctcctgggttcgagagaacagtccctgcaggacacgtcatcagaacacgtcatctcgacacgtcatcgacacacgtcatcctaacacgtcatcactacacgtcatctgcacacgtcatcgtaacacgtcatcggcgcgccatgcttcatcagactct

SEQ ID NO: 257 - DNA, 172 bp, Artificial Sequence; identical to SEQ ID NO: 256
  Synthetic polynucleotide

SEQ ID NO: 258 - DNA, 164 bp, Artificial Sequence
  Synthetic polynucleotide
atcatctcaccttgcctcctgacctctacctagggaaccctgcagggtaatcagcagagtaatcagctcggtaatcagcgacgtaatcagcctagtaatcagcactgtaatcagctgcgtaatcagcgtagtaatcagcggcgcgccatgcttcatcagactct

SEQ ID NO: 259 - DNA, 164 bp, Artificial Sequence; identical to SEQ ID NO: 258
  Synthetic polynucleotide

SEQ ID NO: 260 - DNA, 172 bp, Artificial Sequence
  Synthetic polynucleotide
atcatctcaccttgcctcctgtcatacttacaagagcgcctgcaggaagcaattagagaaagcaattagtcgaagcaattaggacaagcaattagctaaagcaattagactaagcaattagtgcaagcaattaggtaaagcaattagggcgcgccatgcttcatcagactct

SEQ ID NO: 261 - DNA, 172 bp, Artificial Sequence; identical to SEQ ID NO: 260
  Synthetic polynucleotide

SEQ ID NO: 262 - DNA, 148 bp, Artificial Sequence
  Synthetic polynucleotide
atcatctcaccttgcctcctgggctccctttcgcaactcctgcaggattgtttagaattgttttcgattgtttgacattgtttctaattgtttactattgttttgcattgtttgtaattgtttggcgcgccatgcttcatcagactct

SEQ ID NO: 263 - DNA, 148 bp, Artificial Sequence; identical to SEQ ID NO: 262
  Synthetic polynucleotide

SEQ ID NO: 264 - DNA, 196 bp, Artificial Sequence
  Synthetic polynucleotide
atcatctcaccttgcctcctgtcgcgatcgcgaaacgtcctgcaggttggggcgcagctgcgcccctcagattggggcgcagctgcgcccctctcgttggggcgcagctgcgcccctcgacttggggcgcagctgcgcccctcctattggggcgcagctgcgcccctcactggcgcgccatgcttcatcagactct

SEQ ID NO: 265 - DNA, 196 bp, Artificial Sequence; identical to SEQ ID NO: 264
  Synthetic polynucleotide

SEQ ID NO: 266 - DNA, 172 bp, Artificial Sequence
  Synthetic polynucleotide
atcatctcaccttgcctcctggttgatactgctacgctcctgcaggtgaggtgttaagatgaggtgttatcgtgaggtgttagactgaggtgttactatgaggtgttaacttgaggtgttatgctgaggtgttagtatgaggtgttaggcgcgccatgcttcatcagactct

SEQ ID NO: 267 - DNA, 172 bp, Artificial Sequence; identical to SEQ ID NO: 266
  Synthetic polynucleotide

SEQ ID NO: 268 - DNA, 180 bp, Artificial Sequence
  Synthetic polynucleotide
atcatctcaccttgcctcctgataactggatgtctgcccctgcaggcctttgatcttagacctttgatctttcgcctttgatcttgaccctttgatcttctacctttgatcttactcctttgatctttgccctttgatcttgtacctttgatcttggcgcgccatgcttcatcagactct

SEQ ID NO: 269 - DNA, 180 bp, Artificial Sequence; identical to SEQ ID NO: 268
  Synthetic polynucleotide

SEQ ID NO: 270 - DNA, 172 bp, Artificial Sequence
  Synthetic polynucleotide
atcatctcaccttgcctcctgcgaagaatgtaatgacgcctgcaggttaacaatacagattaacaatactcgttaacaatacgacttaacaatacctattaacaatacactttaacaatactgcttaacaatacgtattaacaatacggcgcgccatgcttcatcagactct

SEQ ID NO: 271 - DNA, 172 bp, Artificial Sequence; identical to SEQ ID NO: 270
  Synthetic polynucleotide

SEQ ID NO: 272 - DNA, 185 bp, Artificial Sequence
  Synthetic polynucleotide
atcatctcaccttgcctcctgtgtaggcgggatgcttgcctgcaggtgacctttaaaggtcaagatgacctttaaaggtcatcgtgacctttaaaggtcagactgacctttaaaggtcactatgacctttaaaggtcaacttgacctttaaaggtcatgcggcgcgccatgcttcatcagactct

SEQ ID NO: 273 - DNA, 185 bp, Artificial Sequence; identical to SEQ ID NO: 272
  Synthetic polynucleotide

SEQ ID NO: 274 - DNA, 180 bp, Artificial Sequence
  Synthetic polynucleotide
atcatctcaccttgcctcctgctacgctggtcgatactcctgcagggtggggtgatcagagtggggtgatctcggtggggtgatcgacgtggggtgatcctagtggggtgatcactgtggggtgatctgcgtggggtgatcgtagtggggtgatcggcgcgccatgcttcatcagactct

SEQ ID NO: 275 - DNA, 180 bp, Artificial Sequence; identical to SEQ ID NO: 274
  Synthetic polynucleotide

SEQ ID NO: 276 - DNA, 197 bp, Artificial Sequence
  Synthetic polynucleotide
atcatctcaccttgcctcctgtgggtaccaggcattggcctgcaggtctggcaaaacaaacagatctggcaaaacaaactcgtctggcaaaacaaacgactctggcaaaacaaacctatctggcaaaacaaacacttctggcaaaacaaactgctctggcaaaacaaacgtaggcgcgccatgcttcatcagactct

SEQ ID NO: 277 - DNA, 197 bp, Artificial Sequence; identical to SEQ ID NO: 276
  Synthetic polynucleotide

SEQ ID NO: 278 - DNA, 180 bp, Artificial Sequence
  Synthetic polynucleotide
atcatctcaccttgcctcctgggtatgcttccacatcccctgcagggcccacgtgacagagcccacgtgactcggcccacgtgacgacgcccacgtgacctagcccacgtgacactgcccacgtgactgcgcccacgtgacgtagcccacgtgacggcgcgccatgcttcatcagactct

SEQ ID NO: 279 - DNA, 180 bp, Artificial Sequence; identical to SEQ ID NO: 278
  Synthetic polynucleotide

SEQ ID NO: 280 - DNA, 164 bp, Artificial Sequence
  Synthetic polynucleotide
atcatctcaccttgcctcctgcttgcggatgatagtcacctgcaggcgtgcgcaaagacgtgcgcaatcgcgtgcgcaagaccgtgcgcaactacgtgcgcaaactcgtgcgcaatgccgtgcgcaagtacgtgcgcaaggcgcgccatgcttcatcagactct

SEQ ID NO: 281 - DNA, 164 bp, Artificial Sequence; identical to SEQ ID NO: 280
  Synthetic polynucleotide

SEQ ID NO: 282 - DNA, 164 bp, Artificial Sequence
  Synthetic polynucleotide
atcatctcaccttgcctcctggactcaccactaattatcctgcaggttttacgacagattttacgactcgttttacgacgacttttacgacctattttacgacactttttacgactgcttttacgacgtattttacgacggcgcgccatgcttcatcagactct

SEQ ID NO: 283 - DNA, 164 bp, Artificial Sequence; identical to SEQ ID NO: 282
  Synthetic polynucleotide

SEQ ID NO: 284 - DNA, 188 bp, Artificial Sequence
  Synthetic polynucleotide
atcatctcaccttgcctcctggtatagtttggaggtaccctgcaggggaaatgggcccagaggaaatgggccctcgggaaatgggcccgacggaaatgggcccctaggaaatgggcccactggaaatgggccctgcggaaatgggcccgtaggaaatgggcccggcgcgccatgcttcatcagactct

SEQ ID NO: 285 - DNA, 188 bp, Artificial Sequence; identical to SEQ ID NO: 284
  Synthetic polynucleotide

SEQ ID NO: 286 - DNA, 172 bp, Artificial Sequence
  Synthetic polynucleotide
atcatctcaccttgcctcctgaacctctaagtgggtaacctgcaggggccacgtgaagaggccacgtgatcgggccacgtgagacggccacgtgactaggccacgtgaactggccacgtgatgcggccacgtgagtaggccacgtgaggcgcgccatgcttcatcagactct

SEQ ID NO: 287 - DNA, 172 bp, Artificial Sequence; identical to SEQ ID NO: 286
  Synthetic polynucleotide

SEQ ID NO: 288 - DNA, 197 bp, Artificial Sequence
  Synthetic polynucleotide
atcatctcaccttgcctcctgtaggacatcgatcttaccctgcagggcacagcggggggtcagagcacagcggggggtctcggcacagcggggggtcgacgcacagcggggggtcctagcacagcggggggtcactgcacagcggggggtctgcgcacagcggggggtcgtaggcgcgccatgcttcatcagactct

SEQ ID NO: 289 - DNA, 197 bp, Artificial Sequence; identical to SEQ ID NO: 288
  Synthetic polynucleotide

SEQ ID NO: 290 - DNA, 190 bp, Artificial Sequence
  Synthetic polynucleotide
atcatctcaccttgcctcctgcggcatttatttacctacctgcaggcggctactgtttttagacggctactgttttttcgcggctactgtttttgaccggctactgtttttctacggctactgtttttactcggctactgttttttgccggctactgtttttgtaggcgcgccatgcttcatcagactct

SEQ ID NO: 291 - DNA, 190 bp, Artificial Sequence; identical to SEQ ID NO: 290
  Synthetic polynucleotide

SEQ ID NO: 292 - DNA, 197 bp, Artificial Sequence
  Synthetic polynucleotide
atcatctcaccttgcctcctgctgctttactgcaactacctgcaggcaaaaagagcaaccaagacaaaaagagcaaccatcgcaaaaagagcaaccagaccaaaaagagcaaccactacaaaaagagcaaccaactcaaaaagagcaaccatgccaaaaagagcaaccagtaggcgcgccatgcttcatcagactct

SEQ ID NO: 293 - DNA, 197 bp, Artificial Sequence; identical to SEQ ID NO: 292
  Synthetic polynucleotide

SEQ ID NO: 294 - DNA, 197 bp, Artificial Sequence
  Synthetic polynucleotide
atcatctcaccttgcctcctgttagtgcagtctcgctccctgcaggaaaggtcaagagaggtcaagaaaaggtcaagagaggtcatcgaaaggtcaagagaggtcagacaaaggtcaagagaggtcactaaaaggtcaagagaggtcaactaaaggtcaagagaggtcatgcggcgcgccatgcttcatcagactct

SEQ ID NO: 295 - DNA, 197 bp, Artificial Sequence; identical to SEQ ID NO: 294
  Synthetic polynucleotide

SEQ ID NO: 296 - DNA, 164 bp, Artificial Sequence
  Synthetic polynucleotide
atcatctcaccttgcctcctggacccgcatgtcagtgacctgcaggtcaattaagagatcaattaagtcgtcaattaaggactcaattaagctatcaattaagacttcaattaagtgctcaattaaggtatcaattaagggcgcgccatgcttcatcagactct

SEQ ID NO: 297 - DNA, 164 bp, Artificial Sequence; identical to SEQ ID NO: 296
  Synthetic polynucleotide

SEQ ID NO: 298 - DNA, 172 bp, Artificial Sequence
  Synthetic polynucleotide
atcatctcaccttgcctcctgaagattagggacactagcctgcaggtgggcggggcagatgggcggggctcgtgggcggggcgactgggcggggcctatgggcggggcacttgggcggggctgctgggcggggcgtatgggcggggcggcgcgccatgcttcatcagactct

SEQ ID NO: 299 - DNA, 172 bp, Artificial Sequence; identical to SEQ ID NO: 298
  Synthetic polynucleotide

SEQ ID NO: 300 - DNA, 185 bp, Artificial Sequence
  Synthetic polynucleotide
atcatctcaccttgcctcctgcgtcttagttatcaacacctgcaggcaggtaattacctcagagacaggtaattacctcagtcgcaggtaattacctcaggaccaggtaattacctcagctacaggtaattacctcagactcaggtaattacctcagtgcggcgcgccatgcttcatcagactct

SEQ ID NO: 301 - DNA, 185 bp, Artificial Sequence; identical to SEQ ID NO: 300
  Synthetic polynucleotide

SEQ ID NO: 302 - DNA, 180 bp, Artificial Sequence
  Synthetic polynucleotide
atcatctcaccttgcctcctgtcttggtttcactttgccctgcagggtggggtgataagagtggggtgatatcggtggggtgatagacgtggggtgatactagtggggtgataactgtggggtgatatgcgtggggtgatagtagtggggtgataggcgcgccatgcttcatcagactct

SEQ ID NO: 303 - DNA, 180 bp, Artificial Sequence; identical to SEQ ID NO: 302
  Synthetic polynucleotide

SEQ ID NO: 304 - DNA, 188 bp, Artificial Sequence
  Synthetic polynucleotide
atcatctcaccttgcctcctgccacatgagaatggtttcctgcaggtgacacctgtcaagatgacacctgtcatcgtgacacctgtcagactgacacctgtcactatgacacctgtcaacttgacacctgtcatgctgacacctgtcagtatgacacctgtcaggcgcgccatgcttcatcagactct

SEQ ID NO: 305 - DNA, 188 bp, Artificial Sequence; identical to SEQ ID NO: 304
  Synthetic polynucleotide

SEQ ID NO: 306 - DNA, 197 bp, Artificial Sequence
  Synthetic polynucleotide
atcatctcaccttgcctcctggttcgagctattcatcccctgcaggctgattggtccatttagactgattggtccattttcgctgattggtccatttgacctgattggtccatttctactgattggtccatttactctgattggtccattttgcctgattggtccatttgtaggcgcgccatgcttcatcagactct

SEQ ID NO: 307 - DNA, 197 bp, Artificial Sequence; identical to SEQ ID NO: 306
  Synthetic polynucleotide

SEQ ID NO: 308 - DNA, 197 bp, Artificial Sequence
  Synthetic polynucleotide
atcatctcaccttgcctcctgctatggaattgagactccctgcaggtccaatctattgattagatccaatctattgatttcgtccaatctattgattgactccaatctattgattctatccaatctattgattacttccaatctattgatttgctccaatctattgattgtaggcgcgccatgcttcatcagactct

SEQ ID NO: 309 - DNA, 197 bp, Artificial Sequence; identical to SEQ ID NO: 308
  Synthetic polynucleotide

SEQ ID NO: 310 - DNA, 164 bp, Artificial Sequence
  Synthetic polynucleotide
atcatctcaccttgcctcctgtctcacagacggtagatcctgcaggcaattaaaaagacaattaaaatcgcaattaaaagaccaattaaaactacaattaaaaactcaattaaaatgccaattaaaagtacaattaaaaggcgcgccatgcttcatcagactct

SEQ ID NO: 311 - DNA, 164 bp, Artificial Sequence; identical to SEQ ID NO: 310
  Synthetic polynucleotide

SEQ ID NO: 312 - DNA, 190 bp, Artificial Sequence
  Synthetic polynucleotide
atcatctcaccttgcctcctgcggatatagtcggctatcctgcaggagattcttatctgtagaagattcttatctgttcgagattcttatctgtgacagattcttatctgtctaagattcttatctgtactagattcttatctgttgcagattcttatctgtgtaggcgcgccatgcttcatcagactct

SEQ ID NO: 313 - DNA, 190 bp, Artificial Sequence; identical to SEQ ID NO: 312
  Synthetic polynucleotide

SEQ ID NO: 314 - DNA, 185 bp, Artificial Sequence
  Synthetic polynucleotide
atcatctcaccttgcctcctgcgctacgctagcctttccctgcaggttggggtaattaacgtagattggggtaattaacgttcgttggggtaattaacgtgacttggggtaattaacgtctattggggtaattaacgtactttggggtaattaacgttgcggcgcgccatgcttcatcagactct

SEQ ID NO: 315 - DNA, 185 bp, Artificial Sequence; identical to SEQ ID NO: 314
  Synthetic polynucleotide

SEQ ID NO: 316 - DNA, 197 bp, Artificial Sequence
  Synthetic polynucleotide
atcatctcaccttgcctcctgcatcgtaatggatctcccctgcaggaaatgcgtgggcgtaagaaaatgcgtgggcgtatcgaaatgcgtgggcgtagacaaatgcgtgggcgtactaaaatgcgtgggcgtaactaaatgcgtgggcgtatgcaaatgcgtgggcgtagtaggcgcgccatgcttcatcagactct

SEQ ID NO: 317 - DNA, 197 bp, Artificial Sequence; identical to SEQ ID NO: 316
  Synthetic polynucleotide

SEQ ID NO: 318 - DNA, 188 bp, Artificial Sequence
  Synthetic polynucleotide
atcatctcaccttgcctcctgatcgcccacgacaactacctgcagggtcagcaaatttagagtcagcaaattttcggtcagcaaatttgacgtcagcaaatttctagtcagcaaatttactgtcagcaaattttgcgtcagcaaatttgtagtcagcaaatttggcgcgccatgcttcatcagactct

SEQ ID NO: 319 - DNA, 188 bp, Artificial Sequence; identical to SEQ ID NO: 318
  Synthetic polynucleotide

SEQ ID NO: 320 - DNA, 185 bp, Artificial Sequence
  Synthetic polynucleotide
atcatctcaccttgcctcctgtgatcagctacttgtcacctgcaggtgaccacgtggtcgggagatgaccacgtggtcgggtcgtgaccacgtggtcggggactgaccacgtggtcgggctatgaccacgtggtcgggacttgaccacgtggtcgggtgcggcgcgccatgcttcatcagactct

SEQ ID NO: 321 - DNA, 185 bp, Artificial Sequence; identical to SEQ ID NO: 320
  Synthetic polynucleotide

SEQ ID NO: 322 - DNA, 185 bp, Artificial Sequence
  Synthetic polynucleotide
atcatctcaccttgcctcctgctacccacctcttatgccctgcagggaatattataattataagagaatattataattatatcggaatattataattatagacgaatattataattatactagaatattataattataactgaatattataattatatgcggcgcgccatgcttcatcagactct

SEQ ID NO: 323 - DNA, 185 bp, Artificial Sequence; identical to SEQ ID NO: 322
  Synthetic polynucleotide

SEQ ID NO: 324 - DNA, 140 bp, Artificial Sequence
  Synthetic polynucleotide
atcatctcaccttgcctcctggtcgccatagagatctccctgcaggctatctagactatcttcgctatctgacctatctctactatctactctatcttgcctatctgtactatctggcgcgccatgcttcatcagactct

SEQ ID NO: 325 - DNA, 140 bp, Artificial Sequence; identical to SEQ ID NO: 324
  Synthetic polynucleotide

SEQ ID NO: 326 - DNA, 164 bp, Artificial Sequence
  Synthetic polynucleotide
atcatctcaccttgcctcctgtaccctacaacccacgtcctgcaggcgtgaccccagacgtgacccctcgcgtgaccccgaccgtgaccccctacgtgaccccactcgtgacccctgccgtgaccccgtacgtgaccccggcgcgccatgcttcatcagactct

SEQ ID NO: 327 - DNA, 164 bp, Artificial Sequence; identical to SEQ ID NO: 326
  Synthetic polynucleotide

SEQ ID NO: 328 - DNA, 188 bp, Artificial Sequence
  Synthetic polynucleotide
atcatctcaccttgcctcctgctgcttacatcaacaagcctgcaggaaaaaaacacaaagaaaaaaaacacaatcgaaaaaaacacaagacaaaaaaacacaactaaaaaaaacacaaactaaaaaaacacaatgcaaaaaaacacaagtaaaaaaaacacaaggcgcgccatgcttcatcagactct

SEQ ID NO: 329 - DNA, 188 bp, Artificial Sequence; identical to SEQ ID NO: 328
  Synthetic polynucleotide

SEQ ID NO: 330 - DNA, 185 bp, Artificial Sequence
  Synthetic polynucleotide
atcatctcaccttgcctcctgggcggtcttacatttgacctgcaggatctcgtttcccacagagaatctcgtttcccacagtcgatctcgtttcccacaggacatctcgtttcccacagctaatctcgtttcccacagactatctcgtttcccacagtgcggcgcgccatgcttcatcagactct

SEQ ID NO: 331 - DNA, 185 bp, Artificial Sequence; identical to SEQ ID NO: 330
  Synthetic polynucleotide

SEQ ID NO: 332 - DNA, 148 bp, Artificial Sequence
  Synthetic polynucleotide
atcatctcaccttgcctcctgcatagaatactaagctccctgcaggtctctgcagatctctgctcgtctctgcgactctctgcctatctctgcacttctctgctgctctctgcgtatctctgcggcgcgccatgcttcatcagactct

SEQ ID NO: 333 - DNA, 148 bp, Artificial Sequence; identical to SEQ ID NO: 332
  Synthetic polynucleotide

SEQ ID NO: 334 - DNA, 156 bp, Artificial Sequence
  Synthetic polynucleotide
atcatctcaccttgcctcctggacgtagatttgtttctcctgcaggttttatgaagattttatgatcgttttatgagacttttatgactattttatgaactttttatgatgcttttatgagtattttatgaggcgcgccatgcttcatcagactct

SEQ ID NO: 335 - DNA, 156 bp, Artificial Sequence; identical to SEQ ID NO: 334
  Synthetic polynucleotide

SEQ ID NO: 336 - DNA, 156 bp, Artificial Sequence
  Synthetic polynucleotide
atcatctcaccttgcctcctgctcggaagcatgactgccctgcaggccacttaaagaccacttaatcgccacttaagacccacttaactaccacttaaactccacttaatgcccacttaagtaccacttaaggcgcgccatgcttcatcagactct

SEQ ID NO: 337 - DNA, 156 bp, Artificial Sequence; identical to SEQ ID NO: 336
  Synthetic polynucleotide

SEQ ID NO: 338 - DNA, 197 bp, Artificial Sequence
  Synthetic polynucleotide
atcatctcaccttgcctcctgtgcgtttcacactgccccctgcagggtgacctttgacctacttagagtgacctttgacctactttcggtgacctttgacctacttgacgtgacctttgacctacttctagtgacctttgacctacttactgtgacctttgacctactttgcggcgcgccatgcttcatcagactct

SEQ ID NO: 339 - DNA, 197 bp, Artificial Sequence; identical to SEQ ID NO: 338
  Synthetic polynucleotide

SEQ ID NO: 340 - DNA, 191 bp, Artificial Sequence
  Synthetic polynucleotide
atcatctcaccttgcctcctgatcaccggtctcctaatcctgcaggacatgtctatgacatgtagaacatgtctatgacatgttcgacatgtctatgacatgtgacacatgtctatgacatgtctaacatgtctatgacatgtactacatgtctatgacatgttgcggcgcgccatgcttcatcagactct

SEQ ID NO: 341 - DNA, 191 bp, Artificial Sequence; identical to SEQ ID NO: 340
  Synthetic polynucleotide

SEQ ID NO: 342 - DNA, 164 bp, Artificial Sequence
  Synthetic polynucleotide
atcatctcaccttgcctcctggcttgtacataatgactcctgcaggagagaaaccagaagagaaacctcgagagaaaccgacagagaaaccctaagagaaaccactagagaaacctgcagagaaaccgtaagagaaaccggcgcgccatgcttcatcagactct

SEQ ID NO: 343 - DNA, 164 bp, Artificial Sequence; identical to SEQ ID NO: 342
  Synthetic polynucleotide

SEQ ID NO: 344 - DNA, 191 bp, Artificial Sequence
  Synthetic polynucleotide
atcatctcaccttgcctcctgtttgtggattgttcgtgcctgcaggaaacaattgcattgtttagaaaacaattgcattgttttcgaaacaattgcattgtttgacaaacaattgcattgtttctaaaacaattgcattgtttactaaacaattgcattgttttgcggcgcgccatgcttcatcagactct

SEQ ID NO: 345 - DNA, 191 bp, Artificial Sequence; identical to SEQ ID NO: 344
  Synthetic polynucleotide

SEQ ID NO: 346 - DNA, 197 bp, Artificial Sequence
  Synthetic polynucleotide
atcatctcaccttgcctcctgttgtggtatgctggttgcctgcaggggtcacgtggcccggagaggtcacgtggcccggtcgggtcacgtggcccgggacggtcacgtggcccggctaggtcacgtggcccggactggtcacgtggcccggtgcggtcacgtggcccgggtaggcgcgccatgcttcatcagactct

SEQ ID NO: 347 - DNA, 197 bp, Artificial Sequence; identical to SEQ ID NO: 346
  Synthetic polynucleotide

SEQ ID NO: 348 - DNA, 197 bp, Artificial Sequence
  Synthetic polynucleotide
atcatctcaccttgcctcctgcggctggtaaagaatgccctgcagggaggtcaaaaggtcaatgagagaggtcaaaaggtcaatgtcggaggtcaaaaggtcaatggacgaggtcaaaaggtcaatgctagaggtcaaaaggtcaatgactgaggtcaaaaggtcaatgtgcggcgcgccatgcttcatcagactct

SEQ ID NO: 349 - DNA, 197 bp, Artificial Sequence; identical to SEQ ID NO: 348
  Synthetic polynucleotide

SEQ ID NO: 350 - DNA, 190 bp, Artificial Sequence
  Synthetic polynucleotide
atcatctcaccttgcctcctgaatgcgtcttctaagagcctgcaggttctagaacattctagattctagaacattcttcgttctagaacattctgacttctagaacattctctattctagaacattctactttctagaacattcttgcttctagaacattctgtaggcgcgccatgcttcatcagactct

SEQ ID NO: 351 - DNA, 190 bp, Artificial Sequence; identical to SEQ ID NO: 350
  Synthetic polynucleotide

SEQ ID NO: 352 - DNA, 183 bp, Artificial Sequence
  Synthetic polynucleotide
atcatctcaccttgcctcctgtattcactataggcacccctgcaggggactacaattcccagaatgccccgagaggactacaattcccagaatgccccgtcgggactacaattcccagaatgccccggacggactacaattcccagaatgccccgctaggcgcgccatgcttcatcagactct

SEQ ID NO: 353 - DNA, 183 bp, Artificial Sequence; identical to SEQ ID NO: 352
  Synthetic polynucleotide

SEQ ID NO: 354 - DNA, 188 bp, Artificial Sequence
  Synthetic polynucleotide
atcatctcaccttgcctcctggctgaatccttagatgacctgcaggcgccgcccccgcagacgccgcccccgctcgcgccgcccccgcgaccgccgcccccgcctacgccgcccccgcactcgccgcccccgctgccgccgcccccgcgtacgccgcccccgcggcgcgccatgcttcatcagactct

SEQ ID NO: 355 - DNA, 188 bp, Artificial Sequence; identical to SEQ ID NO: 354
  Synthetic polynucleotide

SEQ ID NO: 356 - DNA, 191 bp, Artificial Sequence
  Synthetic polynucleotide
atcatctcaccttgcctcctggggccgaccaagtatagcctgcaggcatcaattgcagtgatcagacatcaattgcagtgatctcgcatcaattgcagtgatcgaccatcaattgcagtgatcctacatcaattgcagtgatcactcatcaattgcagtgatctgcggcgcgccatgcttcatcagactct

SEQ ID NO: 357 - DNA, 191 bp, Artificial Sequence; identical to SEQ ID NO: 356
  Synthetic polynucleotide

SEQ ID NO: 358 - DNA, 196 bp, Artificial Sequence
  Synthetic polynucleotide
atcatctcaccttgcctcctgtcataaagtgaactaggcctgcaggtcgtcacgcttcaagatcgtcacgcttcatcgtcgtcacgcttcagactcgtcacgcttcactatcgtcacgcttcaacttcgtcacgcttcatgctcgtcacgcttcagtatcgtcacgcttcaggcgcgccatgcttcatcagactct

SEQ ID NO: 359 - DNA, 196 bp, Artificial Sequence; identical to SEQ ID NO: 358
  Synthetic polynucleotide

SEQ ID NO: 360 - DNA, 188 bp, Artificial Sequence
  Synthetic polynucleotide
atcatctcaccttgcctcctgaataagctcgtgacctacctgcaggcattgcgtcaggagacattgcgtcaggtcgcattgcgtcagggaccattgcgtcaggctacattgcgtcaggactcattgcgtcaggtgccattgcgtcagggtacattgcgtcaggggcgcgccatgcttcatcagactct

SEQ ID NO: 361 - DNA, 188 bp, Artificial Sequence; identical to SEQ ID NO: 360
  Synthetic polynucleotide

SEQ ID NO: 362 - DNA, 191 bp, Artificial Sequence
  Synthetic polynucleotide
atcatctcaccttgcctcctgccttgtcctgtgtcactcctgcaggcgtaattaattaattggagacgtaattaattaattggtcgcgtaattaattaattgggaccgtaattaattaattggctacgtaattaattaattggactcgtaattaattaattggtgcggcgcgccatgcttcatcagactct

SEQ ID NO: 363 - DNA, 191 bp, Artificial Sequence; identical to SEQ ID NO: 362
  Synthetic polynucleotide

SEQ ID NO: 364 - DNA, 156 bp, Artificial Sequence
  Synthetic polynucleotide
atcatctcaccttgcctcctggaaccaatcagaagggtcctgcaggccgcgcgcagaccgcgcgctcgccgcgcgcgacccgcgcgcctaccgcgcgcactccgcgcgctgcccgcgcgcgtaccgcgcgcggcgcgccatgcttcatcagactct

SEQ ID NO: 365 - DNA, 156 bp, Artificial Sequence; identical to SEQ ID NO: 364
  Synthetic polynucleotide

SEQ ID NO: 366 - DNA, 172 bp, Artificial Sequence
  Synthetic polynucleotide
atcatctcaccttgcctcctggtccactcccatttgtccctgcaggaagcaattaaagaaagcaattaatcgaagcaattaagacaagcaattaactaaagcaattaaactaagcaattaatgcaagcaattaagtaaagcaattaaggcgcgccatgcttcatcagactct

SEQ ID NO: 367 - DNA, 172 bp, Artificial Sequence; identical to SEQ ID NO: 366
  Synthetic polynucleotide

SEQ ID NO: 368 - DNA, 197 bp, Artificial Sequence
  Synthetic polynucleotide
atcatctcaccttgcctcctgtacgctggatacaactccctgcaggaataatcgcgaatatagaaataatcgcgaatattcgaataatcgcgaatatgacaataatcgcgaatatctaaataatcgcgaatatactaataatcgcgaatattgcaataatcgcgaatatgtaggcgcgccatgcttcatcagactct

SEQ ID NO: 369 - DNA, 197 bp, Artificial Sequence; identical to SEQ ID NO: 368
  Synthetic polynucleotide

SEQ ID NO: 370 - DNA, 148 bp, Artificial Sequence
  Synthetic polynucleotide
atcatctcaccttgcctcctgcccattggagctctactcctgcaggacaacacagaacaacactcgacaacacgacacaacacctaacaacacactacaacactgcacaacacgtaacaacacggcgcgccatgcttcatcagactct

SEQ ID NO: 371 - DNA, 148 bp, Artificial Sequence; identical to SEQ ID NO: 370
  Synthetic polynucleotide

SEQ ID NO: 372 - DNA, 197 bp, Artificial Sequence
  Synthetic polynucleotide
atcatctcaccttgcctcctgaagtgagtgactccctccctgcaggcaatagcggtggtggagacaatagcggtggtggtcgcaatagcggtggtgggaccaatagcggtggtggctacaatagcggtggtggactcaatagcggtggtggtgccaatagcggtggtgggtaggcgcgccatgcttcatcagactct

SEQ ID NO: 373 - DNA, 197 bp, Artificial Sequence; identical to SEQ ID NO: 372
  Synthetic polynucleotide

SEQ ID NO: 374 - DNA, 164 bp, Artificial Sequence
  Synthetic polynucleotide
atcatctcaccttgcctcctgcgtgcgtcacatcgagtcctgcaggatgaccttgagaatgaccttgtcgatgaccttggacatgaccttgctaatgaccttgactatgaccttgtgcatgaccttggtaatgaccttgggcgcgccatgcttcatcagactct

SEQ ID NO: 375 - DNA, 164 bp, Artificial Sequence; identical to SEQ ID NO: 374
  Synthetic polynucleotide

SEQ ID NO: 376 - DNA, 197 bp, Artificial Sequence
  Synthetic polynucleotide
atcatctcaccttgcctcctgtatcggtacaatacgtacctgcaggccacttccggttccgagaccacttccggttccgtcgccacttccggttccggacccacttccggttccgctaccacttccggttccgactccacttccggttccgtgcccacttccggttccggtaggcgcgccatgcttcatcagactct

SEQ ID NO: 377 - DNA, 197 bp, Artificial Sequence; identical to SEQ ID NO: 376
  Synthetic polynucleotide

SEQ ID NO: 378 - DNA, 156 bp, Artificial Sequence
  Synthetic polynucleotide
atcatctcaccttgcctcctgagcgcagcaaatgtgttcctgcagggttaatccagagttaatcctcggttaatccgacgttaatccctagttaatccactgttaatcctgcgttaatccgtagttaatccggcgcgccatgcttcatcagactct

SEQ ID NO: 379 - DNA, 156 bp, Artificial Sequence; identical to SEQ ID NO: 378
  Synthetic polynucleotide

SEQ ID NO: 380 - DNA, 196 bp, Artificial Sequence
  Synthetic polynucleotide
atcatctcaccttgcctcctggtgctcatattgccgcacctgcaggccaccagagggcgagaccaccagagggcgtcgccaccagagggcggacccaccagagggcgctaccaccagagggcgactccaccagagggcgtgcccaccagagggcggtaccaccagagggcgggcgcgccatgcttcatcagactct

SEQ ID NO: 381 - DNA, 196 bp, Artificial Sequence; identical to SEQ ID NO: 380
  Synthetic polynucleotide

SEQ ID NO: 382 - DNA, 191 bp, Artificial Sequence
  Synthetic polynucleotide
atcatctcaccttgcctcctgaactcaagctctgccctcctgcagggatctccatttttggacagagatctccatttttggactcggatctccatttttggacgacgatctccatttttggacctagatctccatttttggacactgatctccatttttggactgcggcgcgccatgcttcatcagactct

SEQ ID NO: 383 - DNA, 191 bp, Artificial Sequence; identical to SEQ ID NO: 382
  Synthetic polynucleotide

SEQ ID NO: 384 - DNA, 164 bp, Artificial Sequence
  Synthetic polynucleotide
atcatctcaccttgcctcctgagggagccagagtttaccctgcagggcgtaaataagagcgtaaatatcggcgtaaatagacgcgtaaatactagcgtaaataactgcgtaaatatgcgcgtaaatagtagcgtaaataggcgcgccatgcttcatcagactct

SEQ ID NO: 385 - DNA, 164 bp, Artificial Sequence; identical to SEQ ID NO: 384
  Synthetic polynucleotide

SEQ ID NO: 386 - DNA, 180 bp, Artificial Sequence
  Synthetic polynucleotide
atcatctcaccttgcctcctgaagtcttggagtcacgccctgcaggttatcttatctagattatcttatcttcgttatcttatctgacttatcttatctctattatcttatctactttatcttatcttgcttatcttatctgtattatcttatctggcgcgccatgcttcatcagactct

SEQ ID NO: 387 - DNA, 180 bp, Artificial Sequence; identical to SEQ ID NO: 386
  Synthetic polynucleotide

SEQ ID NO: 388 - DNA, 185 bp, Artificial Sequence
  Synthetic polynucleotide
atcatctcaccttgcctcctggtgacttgagataatcccctgcaggtcgaacagatggtgacagatcgaacagatggtgactcgtcgaacagatggtgacgactcgaacagatggtgacctatcgaacagatggtgacacttcgaacagatggtgactgcggcgcgccatgcttcatcagactct

SEQ ID NO: 389 - DNA, 185 bp, Artificial Sequence; identical to SEQ ID NO: 388
  Synthetic polynucleotide

SEQ ID NO: 390 - DNA, 172 bp, Artificial Sequence
  Synthetic polynucleotide
atcatctcaccttgcctcctgctatctccgatgcttcgcctgcaggaccagctgtgagaaccagctgtgtcgaccagctgtggacaccagctgtgctaaccagctgtgactaccagctgtgtgcaccagctgtggtaaccagctgtgggcgcgccatgcttcatcagactct

SEQ ID NO: 391 - DNA, 172 bp, Artificial Sequence; identical to SEQ ID NO: 390
  Synthetic polynucleotide

SEQ ID NO: 392 - DNA, 196 bp, Artificial Sequence
  Synthetic polynucleotide
atcatctcaccttgcctcctgtcatcttactgctgggacctgcaggttcccaggaatttagattcccaggaattttcgttcccaggaatttgacttcccaggaatttctattcccaggaatttactttcccaggaattttgcttcccaggaatttgtattcccaggaatttggcgcgccatgcttcatcagactct

SEQ ID NO: 393 - DNA, 196 bp, Artificial Sequence; identical to SEQ ID NO: 392
  Synthetic polynucleotide

SEQ ID NO: 394 - DNA, 197 bp, Artificial Sequence
  Synthetic polynucleotide
atcatctcaccttgcctcctgaagaccgtttagaggcacctgcagggctaaccacaaacgtagagctaaccacaaacgttcggctaaccacaaacgtgacgctaaccacaaacgtctagctaaccacaaacgtactgctaaccacaaacgttgcgctaaccacaaacgtgtaggcgcgccatgcttcatcagactct

SEQ ID NO: 395 - DNA, 197 bp, Artificial Sequence; identical to SEQ ID NO: 394
  Synthetic polynucleotide

SEQ ID NO: 396 - DNA, 196 bp, Artificial Sequence
  Synthetic polynucleotide
atcatctcaccttgcctcctggcccgccctgatgtaatcctgcagggggtggggtgaggagagggtggggtgaggtcggggtggggtgagggacgggtggggtgaggctagggtggggtgaggactgggtggggtgaggtgcgggtggggtgagggtagggtggggtgaggggcgcgccatgcttcatcagactct

SEQ ID NO: 397 - DNA, 196 bp, Artificial Sequence; identical to SEQ ID NO: 396
  Synthetic polynucleotide

SEQ ID NO: 398 - DNA, 156 bp, Artificial Sequence
  Synthetic polynucleotide
atcatctcaccttgcctcctggggcacaagtgtttccacctgcagggacagctgagagacagctgtcggacagctggacgacagctgctagacagctgactgacagctgtgcgacagctggtagacagctgggcgcgccatgcttcatcagactct

SEQ ID NO: 399 - DNA, 156 bp, Artificial Sequence; identical to SEQ ID NO: 398
  Synthetic polynucleotide

SEQ ID NO: 400 - DNA, 188 bp, Artificial Sequence
  Synthetic polynucleotide
atcatctcaccttgcctcctggaaccacacttgtcgcgcctgcaggaaaaatagccctagaaaaaatagcccttcgaaaaatagccctgacaaaaatagccctctaaaaaatagccctactaaaaatagcccttgcaaaaatagccctgtaaaaaatagccctggcgcgccatgcttcatcagactct

SEQ ID NO: 401 - DNA, 188 bp, Artificial Sequence; identical to SEQ ID NO: 400
  Synthetic polynucleotide

SEQ ID NO: 402 - DNA, 172 bp, Artificial Sequence
  Synthetic polynucleotide
atcatctcaccttgcctcctgtctagtacactgctaatcctgcaggtggccttgaaagatggccttgaatcgtggccttgaagactggccttgaactatggccttgaaacttggccttgaatgctggccttgaagtatggccttgaaggcgcgccatgcttcatcagactct

SEQ ID NO: 403 - DNA, 172 bp, Artificial Sequence; identical to SEQ ID NO: 402
  Synthetic polynucleotide

SEQ ID NO: 404 - DNA, 148 bp, Artificial Sequence
  Synthetic polynucleotide
atcatctcaccttgcctcctggatttacgcgttaaacccctgcagggaggtcaagagaggtcatcggaggtcagacgaggtcactagaggtcaactgaggtcatgcgaggtcagtagaggtcaggcgcgccatgcttcatcagactct

SEQ ID NO: 405 - DNA, 148 bp, Artificial Sequence; identical to SEQ ID NO: 404
  Synthetic polynucleotide

SEQ ID NO: 406 - DNA, 180 bp, Artificial Sequence
  Synthetic polynucleotide
atcatctcaccttgcctcctgcgacgaaatcagaacaacctgcaggttgggattacaagattgggattacatcgttgggattacagacttgggattacactattgggattacaactttgggattacatgcttgggattacagtattgggattacaggcgcgccatgcttcatcagactct

SEQ ID NO: 407 - DNA, 180 bp, Artificial Sequence; identical to SEQ ID NO: 406
  Synthetic polynucleotide

SEQ ID NO: 408 - DNA, 148 bp, Artificial Sequence
  Synthetic polynucleotide
atcatctcaccttgcctcctgttcatgccatcaaggcgcctgcagggacaaagagagacaaagtcggacaaaggacgacaaagctagacaaagactgacaaagtgcgacaaaggtagacaaagggcgcgccatgcttcatcagactct

SEQ ID NO: 409 - DNA, 148 bp, Artificial Sequence; identical to SEQ ID NO: 408
  Synthetic polynucleotide

SEQ ID NO: 410 - DNA, 172 bp, Artificial Sequence
  Synthetic polynucleotide
atcatctcaccttgcctcctgcaataggtaagtaacggcctgcaggccggaagtggagaccggaagtggtcgccggaagtgggacccggaagtggctaccggaagtggactccggaagtggtgcccggaagtgggtaccggaagtggggcgcgccatgcttcatcagactct

SEQ ID NO: 411 - DNA, 172 bp, Artificial Sequence; identical to SEQ ID NO: 410
  Synthetic polynucleotide

SEQ ID NO: 412 - DNA, 164 bp, Artificial Sequence
  Synthetic polynucleotide
atcatctcaccttgcctcctgatcgtctcctttgagcccctgcaggccctaatgaagaccctaatgatcgccctaatgagacccctaatgactaccctaatgaactccctaatgatgcccctaatgagtaccctaatgaggcgcgccatgcttcatcagactct

SEQ ID NO: 413 - DNA, 164 bp, Artificial Sequence; identical to SEQ ID NO: 412
  Synthetic polynucleotide

SEQ ID NO: 414 - DNA, 180 bp, Artificial Sequence
  Synthetic polynucleotide
atcatctcaccttgcctcctgcgacccgaattaagtcgcctgcaggagctgtcagaaagaagctgtcagaatcgagctgtcagaagacagctgtcagaactaagctgtcagaaactagctgtcagaatgcagctgtcagaagtaagctgtcagaaggcgcgccatgcttcatcagactct

SEQ ID NO: 415 - DNA, 180 bp, Artificial Sequence; identical to SEQ ID NO: 414
  Synthetic polynucleotide

SEQ ID NO: 416 - DNA, 200 bp, Artificial Sequence
  Synthetic polynucleotide
atcatctcaccttgcctcctgttccctagggtcggttgcctgcaggctagtttcacttcctctttagactagtttcacttcctcttttcgctagtttcacttcctctttgacctagtttcacttcctctttctactagtttcacttcctctttactctagtttcacttcctctttggcgcgccatgcttcatcagactct

SEQ ID NO: 417 - DNA, 200 bp, Artificial Sequence; identical to SEQ ID NO: 416
  Synthetic polynucleotide

SEQ ID NO: 418 - DNA, 197 bp, Artificial Sequence
  Synthetic polynucleotide
atcatctcaccttgcctcctggctacgcagaacagcatcctgcaggggtatttggcaatgcacaagaggtatttggcaatgcacatcgggtatttggcaatgcacagacggtatttggcaatgcacactaggtatttggcaatgcacaactggtatttggcaatgcacatgcggcgcgccatgcttcatcagactct

SEQ ID NO: 419 - DNA, 197 bp, Artificial Sequence; identical to SEQ ID NO: 418
  Synthetic polynucleotide

SEQ ID NO: 420 - DNA, 156 bp, Artificial Sequence
  Synthetic polynucleotide
atcatctcaccttgcctcctgatgcgcttattagataccctgcaggcctcagccagacctcagcctcgcctcagccgaccctcagccctacctcagccactcctcagcctgccctcagccgtacctcagccggcgcgccatgcttcatcagactct

SEQ ID NO: 421 - DNA, 156 bp, Artificial Sequence; identical to SEQ ID NO: 420
  Synthetic polynucleotide

SEQ ID NO: 422 - DNA, 190 bp, Artificial Sequence
  Synthetic polynucleotide
atcatctcaccttgcctcctgagctgtatgttcaacctcctgcaggtgagtaaacaaaaaagatgagtaaacaaaaatcgtgagtaaacaaaaagactgagtaaacaaaaactatgagtaaacaaaaaacttgagtaaacaaaaatgctgagtaaacaaaaagtaggcgcgccatgcttcatcagactct

SEQ ID NO: 423 - DNA, 190 bp, Artificial Sequence; identical to SEQ ID NO: 422
  Synthetic polynucleotide

SEQ ID NO: 424 - DNA, 190 bp, Artificial Sequence
  Synthetic polynucleotide
atcatctcaccttgcctcctgcttgggtgacaatcaatcctgcaggggttacgtcagcgcagaggttacgtcagcgctcgggttacgtcagcgcgacggttacgtcagcgcctaggttacgtcagcgcactggttacgtcagcgctgcggttacgtcagcgcgtaggcgcgccatgcttcatcagactct

SEQ ID NO: 425 - DNA, 190 bp, Artificial Sequence; identical to SEQ ID NO: 424
  Synthetic polynucleotide

SEQ ID NO: 426 - DNA, 191 bp, Artificial Sequence
  Synthetic polynucleotide
atcatctcaccttgcctcctgagtcaaacacgcgtatccctgcaggataaacaattgtaaacaagaataaacaattgtaaacatcgataaacaattgtaaacagacataaacaattgtaaacactaataaacaattgtaaacaactataaacaattgtaaacatgcggcgcgccatgcttcatcagactct

SEQ ID NO: 427 - DNA, 191 bp, Artificial Sequence; identical to SEQ ID NO: 426
  Synthetic polynucleotide

SEQ ID NO: 428 - DNA, 164 bp, Artificial Sequence
  Synthetic polynucleotide
atcatctcaccttgcctcctgttgatgggcaccttgctcctgcaggagataagagagaagataagagtcgagataagaggacagataagagctaagataagagactagataagagtgcagataagaggtaagataagagggcgcgccatgcttcatcagactct

SEQ ID NO: 429 - DNA, 164 bp, Artificial Sequence; identical to SEQ ID NO: 428
  Synthetic polynucleotide

SEQ ID NO: 430 - DNA, 191 bp, Artificial Sequence
  Synthetic polynucleotide
atcatctcaccttgcctcctgcaggacaacctgacgtccctgcagggtgaactcatgcgtgaaaattagagtgaactcatgcgtgaaaatttcggtgaactcatgcgtgaaaattgacgtgaactcatgcgtgaaaattctagtgaactcatgcgtgaaaattactggcgcgccatgcttcatcagactct

SEQ ID NO: 431 - DNA, 191 bp, Artificial Sequence; identical to SEQ ID NO: 430
  Synthetic polynucleotide

SEQ ID NO: 432 - DNA, 188 bp, Artificial Sequence
  Synthetic polynucleotide
atcatctcaccttgcctcctgttgagtctccgcctagccctgcaggccgtttaacggtagaccgtttaacggttcgccgtttaacggtgacccgtttaacggtctaccgtttaacggtactccgtttaacggttgcccgtttaacggtgtaccgtttaacggtggcgcgccatgcttcatcagactct

SEQ ID NO: 433 - DNA, 188 bp, Artificial Sequence; identical to SEQ ID NO: 432
  Synthetic polynucleotide

SEQ ID NO: 434 - DNA, 180 bp, Artificial Sequence
  Synthetic polynucleotide
atcatctcaccttgcctcctgccgacgacagagccttacctgcaggcaggtcacggtagacaggtcacggttcgcaggtcacggtgaccaggtcacggtctacaggtcacggtactcaggtcacggttgccaggtcacggtgtacaggtcacggtggcgcgccatgcttcatcagactct

SEQ ID NO: 435 - DNA, 180 bp, Artificial Sequence; identical to SEQ ID NO: 434
  Synthetic polynucleotide

SEQ ID NO: 436 - DNA, 191 bp, Artificial Sequence
  Synthetic polynucleotide
atcatctcaccttgcctcctgatgctcagccttcagggcctgcaggattgttaatccctctaaagaattgttaatccctctaatcgattgttaatccctctaagacattgttaatccctctaactaattgttaatccctctaaactattgttaatccctctaatgcggcgcgccatgcttcatcagactct

SEQ ID NO: 437 - DNA, 191 bp, Artificial Sequence; identical to SEQ ID NO: 436
  Synthetic polynucleotide

SEQ ID NO: 438 - DNA, 197 bp, Artificial Sequence
  Synthetic polynucleotide
atcatctcaccttgcctcctgtgctggtcactcctatccctgcagggcagccggcgccgccagagcagccggcgccgcctcggcagccggcgccgccgacgcagccggcgccgccctagcagccggcgccgccactgcagccggcgccgcctgcgcagccggcgccgccgtaggcgcgccatgcttcatcagactct

SEQ ID NO: 439 - DNA, 197 bp, Artificial Sequence; identical to SEQ ID NO: 438
  Synthetic polynucleotide

SEQ ID NO: 440 - DNA, 185 bp, Artificial Sequence
  Synthetic polynucleotide
atcatctcaccttgcctcctgcctcctttgcgctaatccctgcaggagcaccatggacagcgagaagcaccatggacagcgtcgagcaccatggacagcggacagcaccatggacagcgctaagcaccatggacagcgactagcaccatggacagcgtgcggcgcgccatgcttcatcagactct

SEQ ID NO: 441 - DNA, 185 bp, Artificial Sequence; identical to SEQ ID NO: 440
  Synthetic polynucleotide

SEQ ID NO: 442 - DNA, 190 bp, Artificial Sequence
  Synthetic polynucleotide
atcatctcaccttgcctcctgattagctgaagggtggtcctgcaggggcacgggttcgagagaggcacgggttcgagtcgggcacgggttcgaggacggcacgggttcgagctaggcacgggttcgagactggcacgggttcgagtgcggcacgggttcgaggtaggcgcgccatgcttcatcagactct

SEQ ID NO: 443 - DNA, 190 bp, Artificial Sequence; identical to SEQ ID NO: 442
  Synthetic polynucleotide

SEQ ID NO: 444 - DNA, 191 bp, Artificial Sequence
  Synthetic polynucleotide
atcatctcaccttgcctcctgaaactgtacgcatacgccctgcaggggcggtcatgcgtgcgcgaccagaggcggtcatgcgtgcgcgacctcgggcggtcatgcgtgcgcgaccgacggcggtcatgcgtgcgcgaccctaggcggtcatgcgtgcgcgaccactggcgcgccatgcttcatcagactct

SEQ ID NO: 445 - DNA, 191 bp, Artificial Sequence; identical to SEQ ID NO: 444
  Synthetic polynucleotide

SEQ ID NO: 446 - DNA, 180 bp, Artificial Sequence
  Synthetic polynucleotide
atcatctcaccttgcctcctgcctctggattggaagtacctgcaggggcttgtttatagaggcttgtttattcgggcttgtttatgacggcttgtttatctaggcttgtttatactggcttgtttattgcggcttgtttatgtaggcttgtttatggcgcgccatgcttcatcagactct

SEQ ID NO: 447 - DNA, 180 bp, Artificial Sequence; identical to SEQ ID NO: 446
  Synthetic polynucleotide

SEQ ID NO: 448 - DNA, 172 bp, Artificial Sequence
  Synthetic polynucleotide
atcatctcaccttgcctcctggcacaagcgtaccacagcctgcaggactaattagcagaactaattagctcgactaattagcgacactaattagcctaactaattagcactactaattagctgcactaattagcgtaactaattagcggcgcgccatgcttcatcagactct

SEQ ID NO: 449 - DNA, 172 bp, Artificial Sequence; identical to SEQ ID NO: 448
  Synthetic polynucleotide

SEQ ID NO: 450 - DNA, 180 bp, Artificial Sequence
  Synthetic polynucleotide
atcatctcaccttgcctcctgatgggatacagtaagctcctgcaggattttacgaccagaattttacgacctcgattttacgaccgacattttacgaccctaattttacgaccactattttacgacctgcattttacgaccgtaattttacgaccggcgcgccatgcttcatcagactct

SEQ ID NO: 451 - DNA, 180 bp, Artificial Sequence; identical to SEQ ID NO: 450
  Synthetic polynucleotide

SEQ ID NO: 452 - DNA, 191 bp, Artificial Sequence
  Synthetic polynucleotide
atcatctcaccttgcctcctgactgagggtaagtggtgcctgcaggcctattaattaattccgagacctattaattaattccgtcgcctattaattaattccggaccctattaattaattccgctacctattaattaattccgactcctattaattaattccgtgcggcgcgccatgcttcatcagactct

SEQ ID NO: 453 - DNA, 191 bp, Artificial Sequence; identical to SEQ ID NO: 452
  Synthetic polynucleotide

SEQ ID NO: 454 - DNA, 164 bp, Artificial Sequence
  Synthetic polynucleotide
atcatctcaccttgcctcctgtggagaacattggtattcctgcaggggtcataaaagaggtcataaatcgggtcataaagacggtcataaactaggtcataaaactggtcataaatgcggtcataaagtaggtcataaaggcgcgccatgcttcatcagactct

SEQ ID NO: 455 - DNA, 164 bp, Artificial Sequence; identical to SEQ ID NO: 454
  Synthetic polynucleotide

SEQ ID NO: 456 - DNA, 164 bp, Artificial Sequence
  Synthetic polynucleotide
atcatctcaccttgcctcctgtcggttgcgaatcggctcctgcaggatcgcgttaagaatcgcgttatcgatcgcgttagacatcgcgttactaatcgcgttaactatcgcgttatgcatcgcgttagtaatcgcgttaggcgcgccatgcttcatcagactct

SEQ ID NO: 457 - DNA, 164 bp, Artificial Sequence; identical to SEQ ID NO: 456
  Synthetic polynucleotide

SEQ ID NO: 458 - DNA, 164 bp, Artificial Sequence
  Synthetic polynucleotide
atcatctcaccttgcctcctgcctatgtggttgtgctccctgcagggggattagcagagggattagctcggggattagcgacgggattagcctagggattagcactgggattagctgcgggattagcgtagggattagcggcgcgccatgcttcatcagactct

SEQ ID NO: 459 - DNA, 164 bp, Artificial Sequence; identical to SEQ ID NO: 458
  Synthetic polynucleotide

SEQ ID NO: 460 - DNA, 191 bp, Artificial Sequence
  Synthetic polynucleotide
atcatctcaccttgcctcctggttaagaagtttctacgcctgcaggaatcactgcaattgattagaaatcactgcaattgatttcgaatcactgcaattgattgacaatcactgcaattgattctaaatcactgcaattgattactaatcactgcaattgatttgcggcgcgccatgcttcatcagactct

SEQ ID NO: 461 - DNA, 191 bp, Artificial Sequence; identical to SEQ ID NO: 460
  Synthetic polynucleotide

SEQ ID NO: 462 - DNA, 196 bp, Artificial Sequence
  Synthetic polynucleotide
atcatctcaccttgcctcctgcgtattggaatgccgctcctgcaggaggggattcccctagaaggggattccccttcgaggggattcccctgacaggggattcccctctaaggggattcccctactaggggattccccttgcaggggattcccctgtaaggggattcccctggcgcgccatgcttcatcagactct

SEQ ID NO: 463 - DNA, 196 bp, Artificial Sequence; identical to SEQ ID NO: 462
  Synthetic polynucleotide

SEQ ID NO: 464 - DNA, 164 bp, Artificial Sequence
  Synthetic polynucleotide
atcatctcaccttgcctcctgaattaccgaccctacaccctgcaggaccacgtggagaaccacgtggtcgaccacgtgggacaccacgtggctaaccacgtggactaccacgtggtgcaccacgtgggtaaccacgtggggcgcgccatgcttcatcagactct

SEQ ID NO: 465 - DNA, 164 bp, Artificial Sequence; identical to SEQ ID NO: 464
  Synthetic polynucleotide

SEQ ID NO: 466 - DNA, 172 bp, Artificial Sequence
  Synthetic polynucleotide
atcatctcaccttgcctcctgatatattccgactggtccctgcaggaccacgtgatagaaccacgtgattcgaccacgtgatgacaccacgtgatctaaccacgtgatactaccacgtgattgcaccacgtgatgtaaccacgtgatggcgcgccatgcttcatcagactct

SEQ ID NO: 467 - DNA, 172 bp, Artificial Sequence; identical to SEQ ID NO: 466
  Synthetic polynucleotide

SEQ ID NO: 468 - DNA, 197 bp, Artificial Sequence
  Synthetic polynucleotide
atcatctcaccttgcctcctgcggtactagcttcgaagcctgcaggttatattaatttctcagattatattaatttctctcgttatattaatttctcgacttatattaatttctcctattatattaatttctcactttatattaatttctctgcttatattaatttctcgtaggcgcgccatgcttcatcagactct

SEQ ID NO: 469 - DNA, 197 bp, Artificial Sequence; identical to SEQ ID NO: 468
  Synthetic polynucleotide

SEQ ID NO: 470 - DNA, 172 bp, Artificial Sequence
  Synthetic polynucleotide
atcatctcaccttgcctcctgacaggtcgcacaagatccctgcaggctataaatagagactataaatagtcgctataaataggacctataaatagctactataaatagactctataaatagtgcctataaataggtactataaatagggcgcgccatgcttcatcagactct

SEQ ID NO: 471 - DNA, 172 bp, Artificial Sequence; identical to SEQ ID NO: 470
  Synthetic polynucleotide

SEQ ID NO: 472 - DNA, 156 bp, Artificial Sequence
  Synthetic polynucleotide
atcatctcaccttgcctcctgccgattcatatagtagtcctgcaggaggtgcggagaaggtgcggtcgaggtgcgggacaggtgcggctaaggtgcggactaggtgcggtgcaggtgcgggtaaggtgcggggcgcgccatgcttcatcagactct

SEQ ID NO: 473 - DNA, 156 bp, Artificial Sequence; identical to SEQ ID NO: 472
  Synthetic polynucleotide

SEQ ID NO: 474 - DNA, 172 bp, Artificial Sequence
  Synthetic polynucleotide
atcatctcaccttgcctcctgctggtaaggaaggtatccctgcaggaccacgtgccagaaccacgtgcctcgaccacgtgccgacaccacgtgccctaaccacgtgccactaccacgtgcctgcaccacgtgccgtaaccacgtgccggcgcgccatgcttcatcagactct

SEQ ID NO: 475 - DNA, 172 bp, Artificial Sequence; identical to SEQ ID NO: 474
  Synthetic polynucleotide

SEQ ID NO: 476 - DNA, 190 bp, Artificial Sequence
  Synthetic polynucleotide
atcatctcaccttgcctcctgtgtgaggtggactcgtacctgcaggggcaataaaactttagaggcaataaaacttttcgggcaataaaactttgacggcaataaaactttctaggcaataaaactttactggcaataaaacttttgcggcaataaaactttgtaggcgcgccatgcttcatcagactct

SEQ ID NO: 477 - DNA, 190 bp, Artificial Sequence; identical to SEQ ID NO: 476
  Synthetic polynucleotide

SEQ ID NO: 478 - DNA, 180 bp, Artificial Sequence
  Synthetic polynucleotide
atcatctcaccttgcctcctgtttaagcagtgagcgagcctgcaggtaaataggtcaagataaataggtcatcgtaaataggtcagactaaataggtcactataaataggtcaacttaaataggtcatgctaaataggtcagtataaataggtcaggcgcgccatgcttcatcagactct

SEQ ID NO: 479 - DNA, 180 bp, Artificial Sequence; identical to SEQ ID NO: 478
  Synthetic polynucleotide

SEQ ID NO: 480 - DNA, 197 bp, Artificial Sequence
  Synthetic polynucleotide
atcatctcaccttgcctcctgtctagcagaggagaggacctgcagggatgagtcaccccccagagatgagtcacccccctcggatgagtcaccccccgacgatgagtcaccccccctagatgagtcaccccccactgatgagtcacccccctgcgatgagtcaccccccgtaggcgcgccatgcttcatcagactct

SEQ ID NO: 481 - DNA, 197 bp, Artificial Sequence; identical to SEQ ID NO: 480
  Synthetic polynucleotide

SEQ ID NO: 482 - DNA, 164 bp, Artificial Sequence
  Synthetic polynucleotide
atcatctcaccttgcctcctgcacaccatcattggtcacctgcaggtaattagtgagataattagtgtcgtaattagtggactaattagtgctataattagtgacttaattagtgtgctaattagtggtataattagtgggcgcgccatgcttcatcagactct

SEQ ID NO: 483 - DNA, 164 bp, Artificial Sequence; identical to SEQ ID NO: 482
  Synthetic polynucleotide

SEQ ID NO: 484 - DNA, 185 bp, Artificial Sequence
  Synthetic polynucleotide
atcatctcaccttgcctcctgatccagaaaccagctcacctgcaggttgggggcgcccctagagattgggggcgcccctagtcgttgggggcgcccctaggacttgggggcgcccctagctattgggggcgcccctagactttgggggcgcccctagtgcggcgcgccatgcttcatcagactct

SEQ ID NO: 485 - DNA, 185 bp, Artificial Sequence; identical to SEQ ID NO: 484
  Synthetic polynucleotide

SEQ ID NO: 486 - DNA, 190 bp, Artificial Sequence
  Synthetic polynucleotide
atcatctcaccttgcctcctgtggctagtggtgtaaatcctgcaggtgacctttgaccccagatgacctttgacccctcgtgacctttgaccccgactgacctttgaccccctatgacctttgaccccacttgacctttgacccctgctgacctttgaccccgtaggcgcgccatgcttcatcagactct

SEQ ID NO: 487 - DNA, 190 bp, Artificial Sequence; identical to SEQ ID NO: 486
  Synthetic polynucleotide

SEQ ID NO: 488 - DNA, 156 bp, Artificial Sequence
  Synthetic polynucleotide
atcatctcaccttgcctcctgaagtctaccgtgccatgcctgcaggtgtgtcatagatgtgtcattcgtgtgtcatgactgtgtcatctatgtgtcatacttgtgtcattgctgtgtcatgtatgtgtcatggcgcgccatgcttcatcagactct

SEQ ID NO: 489 - DNA, 156 bp, Artificial Sequence; identical to SEQ ID NO: 488
  Synthetic polynucleotide

SEQ ID NO: 490 - DNA, 185 bp, Artificial Sequence
  Synthetic polynucleotide
atcatctcaccttgcctcctgcacccgagtggaatgagcctgcagggcgaactaattaatgcagagcgaactaattaatgctcggcgaactaattaatgcgacgcgaactaattaatgcctagcgaactaattaatgcactgcgaactaattaatgctgcggcgcgccatgcttcatcagactct

SEQ ID NO: 491 - DNA, 185 bp, Artificial Sequence; identical to SEQ ID NO: 490
  Synthetic polynucleotide

SEQ ID NO: 492 - DNA, 191 bp, Artificial Sequence
  Synthetic polynucleotide
atcatctcaccttgcctcctgttctagacatgagttggcctgcaggccctccctcccccccccagaccctccctccccccccctcgccctccctcccccccccgacccctccctcccccccccctaccctccctcccccccccactccctccctccccccccctgcggcgcgccatgcttcatcagactct

SEQ ID NO: 493 - DNA, 191 bp, Artificial Sequence; identical to SEQ ID NO: 492
  Synthetic polynucleotide

SEQ ID NO: 494 - DNA, 197 bp, Artificial Sequence
  Synthetic polynucleotide
atcatctcaccttgcctcctgtcggcctataataggaccctgcaggagagtccaaagtccaagaagagtccaaagtccatcgagagtccaaagtccagacagagtccaaagtccactaagagtccaaagtccaactagagtccaaagtccatgcagagtccaaagtccagtaggcgcgccatgcttcatcagactct

SEQ ID NO: 495 - DNA, 197 bp, Artificial Sequence; identical to SEQ ID NO: 494
  Synthetic polynucleotide

SEQ ID NO: 496 - DNA, 148 bp, Artificial Sequence
  Synthetic polynucleotide
atcatctcaccttgcctcctgattgggatagctgcgagcctgcaggatttatgagaatttatgtcgatttatggacatttatgctaatttatgactatttatgtgcatttatggtaatttatgggcgcgccatgcttcatcagactct

SEQ ID NO: 497 - DNA, 148 bp, Artificial Sequence; identical to SEQ ID NO: 496
  Synthetic polynucleotide

SEQ ID NO: 498 - DNA, 196 bp, Artificial Sequence
  Synthetic polynucleotide
atcatctcaccttgcctcctgccgagtagacaagttctcctgcaggtggccccccccccagatggcccccccccctcgtggccccccccccgactggccccccccccctatggccccccccccacttggcccccccccctgctggccccccccccgtatggccccccccccggcgcgccatgcttcatcagactct

SEQ ID NO: 499 - DNA, 196 bp, Artificial Sequence; identical to SEQ ID NO: 498
  Synthetic polynucleotide

SEQ ID NO: 500 - DNA, 180 bp, Artificial Sequence
  Synthetic polynucleotide
atcatctcaccttgcctcctgacgcggatattctgtatcctgcaggggatgactcatagaggatgactcattcgggatgactcatgacggatgactcatctaggatgactcatactggatgactcattgcggatgactcatgtaggatgactcatggcgcgccatgcttcatcagactct

SEQ ID NO: 501 - DNA, 180 bp, Artificial Sequence; identical to SEQ ID NO: 500
  Synthetic polynucleotide

SEQ ID NO: 502 - DNA, 196 bp, Artificial Sequence
  Synthetic polynucleotide
atcatctcaccttgcctcctggcgaatggtggttcactcctgcaggcatcaatcaagctagacatcaatcaagcttcgcatcaatcaagctgaccatcaatcaagctctacatcaatcaagctactcatcaatcaagcttgccatcaatcaagctgtacatcaatcaagctggcgcgccatgcttcatcagactct

SEQ ID NO: 503 - DNA, 196 bp, Artificial Sequence; identical to SEQ ID NO: 502
  Synthetic polynucleotide

SEQ ID NO: 504 - DNA, 179 bp, Artificial Sequence
  Synthetic polynucleotide
atcatctcaccttgcctcctgagtgacaatgatacggtcctgcaggattaaatgacacgtcatctttcagagaattaaatgacacgtcatctttcagtcgattaaatgacacgtcatctttcaggacattaaatgacacgtcatctttcagctaggcgcgccatgcttcatcagactct

SEQ ID NO: 505 - DNA, 179 bp, Artificial Sequence; identical to SEQ ID NO: 504
  Synthetic polynucleotide

SEQ ID NO: 506 - DNA, 196 bp, Artificial Sequence
  Synthetic polynucleotide
atcatctcaccttgcctcctgtgaaagtaggctcaaagcctgcaggagaaagggttaatagaagaaagggttaattcgagaaagggttaatgacagaaagggttaatctaagaaagggttaatactagaaagggttaattgcagaaagggttaatgtaagaaagggttaatggcgcgccatgcttcatcagactct

SEQ ID NO: 507 - DNA, 196 bp, Artificial Sequence; identical to SEQ ID NO: 506
  Synthetic polynucleotide

SEQ ID NO: 508 - DNA, 191 bp, Artificial Sequence
  Synthetic polynucleotide
atcatctcaccttgcctcctgtttgtcatcggagcccacctgcaggtaattattaattaattaagataattattaattaattatcgtaattattaattaattagactaattattaattaattactataattattaattaattaacttaattattaattaattatgcggcgcgccatgcttcatcagactct

SEQ ID NO: 509 - DNA, 191 bp, Artificial Sequence; identical to SEQ ID NO: 508
  Synthetic polynucleotide

SEQ ID NO: 510 - DNA, 140 bp, Artificial Sequence
  Synthetic polynucleotide
atcatctcaccttgcctcctgcagctacatatttgttccctgcaggttaattagattaatttcgttaattgacttaattctattaattactttaatttgcttaattgtattaattggcgcgccatgcttcatcagactct

SEQ ID NO: 511 - DNA, 140 bp, Artificial Sequence; identical to SEQ ID NO: 510
  Synthetic polynucleotide

SEQ ID NO: 512 - DNA, 191 bp, Artificial Sequence
  Synthetic polynucleotide
atcatctcaccttgcctcctgcccgactggcgcatattcctgcagggaacactgcaattgttcagagaacactgcaattgttctcggaacactgcaattgttcgacgaacactgcaattgttcctagaacactgcaattgttcactgaacactgcaattgttctgcggcgcgccatgcttcatcagactct

SEQ ID NO: 513 - DNA, 191 bp, Artificial Sequence; identical to SEQ ID NO: 512
  Synthetic polynucleotide

SEQ ID NO: 514 - DNA, 172 bp, Artificial Sequence
  Synthetic polynucleotide
atcatctcaccttgcctcctgtgattggaagccctatgcctgcaggcaagcgtgacagacaagcgtgactcgcaagcgtgacgaccaagcgtgacctacaagcgtgacactcaagcgtgactgccaagcgtgacgtacaagcgtgacggcgcgccatgcttcatcagactct

SEQ ID NO: 515 - DNA, 172 bp, Artificial Sequence; identical to SEQ ID NO: 514
  Synthetic polynucleotide

SEQ ID NO: 516 - DNA, 164 bp, Artificial Sequence
  Synthetic polynucleotide
atcatctcaccttgcctcctgcaccttgtcagcgttgccctgcaggcctgcaggtagacctgcaggttcgcctgcaggtgaccctgcaggtctacctgcaggtactcctgcaggttgccctgcaggtgtacctgcaggtggcgcgccatgcttcatcagactct

SEQ ID NO: 517 - DNA, 164 bp, Artificial Sequence; identical to SEQ ID NO: 516
  Synthetic polynucleotide

SEQ ID NO: 518 - DNA, 188 bp, Artificial Sequence
  Synthetic polynucleotide
atcatctcaccttgcctcctgggagtaagagctgcgtccctgcaggggtttcgctttcagaggtttcgctttctcgggtttcgctttcgacggtttcgctttcctaggtttcgctttcactggtttcgctttctgcggtttcgctttcgtaggtttcgctttcggcgcgccatgcttcatcagactct

SEQ ID NO: 519 - DNA, 188 bp, Artificial Sequence; identical to SEQ ID NO: 518
  Synthetic polynucleotide

SEQ ID NO: 520 - DNA, 164 bp, Artificial Sequence
  Synthetic polynucleotide
atcatctcaccttgcctcctgtcccatgcttcataagacctgcaggctttggactagactttggacttcgctttggactgacctttggactctactttggactactctttggacttgcctttggactgtactttggactggcgcgccatgcttcatcagactct

SEQ ID NO: 521 - DNA, 164 bp, Artificial Sequence; identical to SEQ ID NO: 520
  Synthetic polynucleotide

SEQ ID NO: 522 - DNA, 156 bp, Artificial Sequence
  Synthetic polynucleotide
atcatctcaccttgcctcctgcaacaggagcttagggccctgcaggttaatggcagattaatggctcgttaatggcgacttaatggcctattaatggcactttaatggctgcttaatggcgtattaatggcggcgcgccatgcttcatcagactct

SEQ ID NO: 523 - DNA, 156 bp, Artificial Sequence; identical to SEQ ID NO: 522
  Synthetic polynucleotide

SEQ ID NO: 524 - DNA, 156 bp, Artificial Sequence
  Synthetic polynucleotide
atcatctcaccttgcctcctggcacgaacaatgggttgcctgcaggggggagggagaggggagggtcgggggaggggacggggagggctaggggagggactggggagggtgcggggaggggtaggggagggggcgcgccatgcttcatcagactct

SEQ ID NO: 525 - DNA, 156 bp, Artificial Sequence; identical to SEQ ID NO: 524
  Synthetic polynucleotide

SEQ ID NO: 526 - DNA, 188 bp, Artificial Sequence
  Synthetic polynucleotide
atcatctcaccttgcctcctgcaccggtaggtatacgtcctgcaggccgcacgtacgcagaccgcacgtacgctcgccgcacgtacgcgacccgcacgtacgcctaccgcacgtacgcactccgcacgtacgctgcccgcacgtacgcgtaccgcacgtacgcggcgcgccatgcttcatcagactct

SEQ ID NO: 527 - DNA, 188 bp, Artificial Sequence; identical to SEQ ID NO: 526
  Synthetic polynucleotide

SEQ ID NO: 528 - DNA, 191 bp, Artificial Sequence
  Synthetic polynucleotide
atcatctcaccttgcctcctgtgcgattatacagacatcctgcaggtagtgccatctggtggcagatagtgccatctggtggctcgtagtgccatctggtggcgactagtgccatctggtggcctatagtgccatctggtggcacttagtgccatctggtggctgcggcgcgccatgcttcatcagactct

SEQ ID NO: 529 - DNA, 191 bp, Artificial Sequence; identical to SEQ ID NO: 528
  Synthetic polynucleotide

SEQ ID NO: 530 - DNA, 196 bp, Artificial Sequence
  Synthetic polynucleotide
atcatctcaccttgcctcctgagtattcccagcactttcctgcaggctcatgaatatatagactcatgaatatattcgctcatgaatatatgacctcatgaatatatctactcatgaatatatactctcatgaatatattgcctcatgaatatatgtactcatgaatatatggcgcgccatgcttcatcagactct

SEQ ID NO: 531 - DNA, 196 bp, Artificial Sequence; identical to SEQ ID NO: 530
  Synthetic polynucleotide

SEQ ID NO: 532 - DNA, 180 bp, Artificial Sequence
  Synthetic polynucleotide
atcatctcaccttgcctcctggacctataccgatagaacctgcaggggggattggccagaggggattggcctcgggggattggccgacggggattggccctaggggattggccactggggattggcctgcggggattggccgtaggggattggccggcgcgccatgcttcatcagactct

SEQ ID NO: 533 - DNA, 180 bp, Artificial Sequence; identical to SEQ ID NO: 532
  Synthetic polynucleotide

SEQ ID NO: 534 - DNA, 148 bp, Artificial Sequence
  Synthetic polynucleotide
atcatctcaccttgcctcctggcagcttcagcgattggcctgcaggttttccaagattttccatcgttttccagacttttccactattttccaactttttccatgcttttccagtattttccaggcgcgccatgcttcatcagactct

SEQ ID NO: 535 - DNA, 148 bp, Artificial Sequence; identical to SEQ ID NO: 534
  Synthetic polynucleotide

SEQ ID NO: 536 - DNA, 190 bp, Artificial Sequence
  Synthetic polynucleotide
atcatctcaccttgcctcctgtcgagtgggtgcagaaccctgcaggtttgcatatgcatgagatttgcatatgcatgtcgtttgcatatgcatggactttgcatatgcatgctatttgcatatgcatgacttttgcatatgcatgtgctttgcatatgcatggtaggcgcgccatgcttcatcagactct

SEQ ID NO: 537 - DNA, 190 bp, Artificial Sequence; identical to SEQ ID NO: 536
  Synthetic polynucleotide

SEQ ID NO: 538 - DNA, 172 bp, Artificial Sequence
  Synthetic polynucleotide
atcatctcaccttgcctcctgtatccttgagcatggtacctgcaggcgtgatagggagacgtgatagggtcgcgtgataggggaccgtgatagggctacgtgatagggactcgtgatagggtgccgtgataggggtacgtgatagggggcgcgccatgcttcatcagactct

SEQ ID NO: 539 - DNA, 172 bp, Artificial Sequence; identical to SEQ ID NO: 538
  Synthetic polynucleotide

SEQ ID NO: 540 - DNA, 172 bp, Artificial Sequence
  Synthetic polynucleotide
atcatctcaccttgcctcctgatctaaagcaagcatctcctgcaggatttgcatatagaatttgcatattcgatttgcatatgacatttgcatatctaatttgcatatactatttgcatattgcatttgcatatgtaatttgcatatggcgcgccatgcttcatcagactct

SEQ ID NO: 541 - DNA, 172 bp, Artificial Sequence; identical to SEQ ID NO: 540
  Synthetic polynucleotide

SEQ ID NO: 542 - DNA, 196 bp, Artificial Sequence
  Synthetic polynucleotide
atcatctcaccttgcctcctgtagaatgacccactatgcctgcaggggtattcccaagtagaggtattcccaagttcgggtattcccaagtgacggtattcccaagtctaggtattcccaagtactggtattcccaagttgcggtattcccaagtgtaggtattcccaagtggcgcgccatgcttcatcagactct

SEQ ID NO: 543 - DNA, 196 bp, Artificial Sequence; identical to SEQ ID NO: 542
  Synthetic polynucleotide

SEQ ID NO: 544 - DNA, 156 bp, Artificial Sequence
  Synthetic polynucleotide
atcatctcaccttgcctcctgaccaaacatctcgtatccctgcaggagcgctgtagaagcgctgttcgagcgctgtgacagcgctgtctaagcgctgtactagcgctgttgcagcgctgtgtaagcgctgtggcgcgccatgcttcatcagactct

SEQ ID NO: 545 - DNA, 156 bp, Artificial Sequence; identical to SEQ ID NO: 544
  Synthetic polynucleotide

SEQ ID NO: 546 - DNA, 156 bp, Artificial Sequence
  Synthetic polynucleotide
atcatctcaccttgcctcctgttatagcgtcattagggcctgcaggtaacaataagataacaatatcgtaacaatagactaacaatactataacaataacttaacaatatgctaacaatagtataacaataggcgcgccatgcttcatcagactct

SEQ ID NO: 547 - DNA, 156 bp, Artificial Sequence; identical to SEQ ID NO: 546
  Synthetic polynucleotide

SEQ ID NO: 548 - DNA, 172 bp, Artificial Sequence
  Synthetic polynucleotide
atcatctcaccttgcctcctgtgaatagaccacgcacgcctgcaggtttgaaccctagatttgaacccttcgtttgaaccctgactttgaaccctctatttgaaccctacttttgaacccttgctttgaaccctgtatttgaaccctggcgcgccatgcttcatcagactct

SEQ ID NO: 549 - DNA, 172 bp, Artificial Sequence; identical to SEQ ID NO: 548
  Synthetic polynucleotide

SEQ ID NO: 550 - DNA, 188 bp, Artificial Sequence
  Synthetic polynucleotide
atcatctcaccttgcctcctgatggtgtggcaaacggtcctgcaggctaatttgcataagactaatttgcatatcgctaatttgcatagacctaatttgcatactactaatttgcataactctaatttgcatatgcctaatttgcatagtactaatttgcataggcgcgccatgcttcatcagactct

SEQ ID NO: 551 - DNA, 188 bp, Artificial Sequence; identical to SEQ ID NO: 550
  Synthetic polynucleotide

SEQ ID NO: 552 - DNA, 156 bp, Artificial Sequence
  Synthetic polynucleotide
atcatctcaccttgcctcctgcactttgacgtatctgccctgcaggttgaccccagattgacccctcgttgaccccgacttgaccccctattgaccccactttgacccctgcttgaccccgtattgaccccggcgcgccatgcttcatcagactct

SEQ ID NO: 553 - DNA, 156 bp, Artificial Sequence; identical to SEQ ID NO: 552
  Synthetic polynucleotide

SEQ ID NO: 554 - DNA, 172 bp, Artificial Sequence
  Synthetic polynucleotide
atcatctcaccttgcctcctgccaaaggcatcccgaagcctgcaggccacatgaccagaccacatgacctcgccacatgaccgacccacatgaccctaccacatgaccactccacatgacctgcccacatgaccgtaccacatgaccggcgcgccatgcttcatcagactct

SEQ ID NO: 555 - DNA, 172 bp, Artificial Sequence; identical to SEQ ID NO: 554
  Synthetic polynucleotide

SEQ ID NO: 556 - DNA, 180 bp, Artificial Sequence
  Synthetic polynucleotide
atcatctcaccttgcctcctgttgacatacctttcagtcctgcagggattgtgtccgagagattgtgtccgtcggattgtgtccggacgattgtgtccgctagattgtgtccgactgattgtgtccgtgcgattgtgtccggtagattgtgtccgggcgcgccatgcttcatcagactct

SEQ ID NO: 557 - DNA, 180 bp, Artificial Sequence; identical to SEQ ID NO: 556
  Synthetic polynucleotide

SEQ ID NO: 558 - DNA, 200 bp, Artificial Sequence
  Synthetic polynucleotide
atcatctcaccttgcctcctggctcatctcaccaactccctgcaggtcacacctttaaggtgtgaagatcacacctttaaggtgtgatcgtcacacctttaaggtgtgagactcacacctttaaggtgtgactatcacacctttaaggtgtgaacttcacacctttaaggtgtgaggcgcgccatgcttcatcagactct

SEQ ID NO: 559 - DNA, 200 bp, Artificial Sequence; identical to SEQ ID NO: 558
  Synthetic polynucleotide

SEQ ID NO: 560 - DNA, 190 bp, Artificial Sequence
  Synthetic polynucleotide
atcatctcaccttgcctcctggctcaatggccgtgttgcctgcaggagattgtgcaatgtagaagattgtgcaatgttcgagattgtgcaatgtgacagattgtgcaatgtctaagattgtgcaatgtactagattgtgcaatgttgcagattgtgcaatgtgtaggcgcgccatgcttcatcagactct

SEQ ID NO: 561 - DNA, 190 bp, Artificial Sequence; identical to SEQ ID NO: 560
  Synthetic polynucleotide

SEQ ID NO: 562 - DNA, 188 bp, Artificial Sequence
  Synthetic polynucleotide
atcatctcaccttgcctcctgtattcctcggccaatttcctgcaggaatttgcatattagaaatttgcatatttcgaatttgcatattgacaatttgcatattctaaatttgcatattactaatttgcatatttgcaatttgcatattgtaaatttgcatattggcgcgccatgcttcatcagactct

SEQ ID NO: 563 - DNA, 188 bp, Artificial Sequence; identical to SEQ ID NO: 562
  Synthetic polynucleotide

SEQ ID NO: 564 - DNA, 172 bp, Artificial Sequence
  Synthetic polynucleotide
atcatctcaccttgcctcctgaatcactgtcaggtgctcctgcaggcgtctagacaagacgtctagacatcgcgtctagacagaccgtctagacactacgtctagacaactcgtctagacatgccgtctagacagtacgtctagacaggcgcgccatgcttcatcagactct

SEQ ID NO: 565 - DNA, 172 bp, Artificial Sequence; identical to SEQ ID NO: 564
  Synthetic polynucleotide

SEQ ID NO: 566 - DNA, 191 bp, Artificial Sequence
  Synthetic polynucleotide
atcatctcaccttgcctcctgtctacatggatctctcccctgcaggtagtgaacaatagatttagatagtgaacaatagattttcgtagtgaacaatagatttgactagtgaacaatagatttctatagtgaacaatagatttacttagtgaacaatagattttgcggcgcgccatgcttcatcagactct

SEQ ID NO: 567 - DNA, 191 bp, Artificial Sequence; identical to SEQ ID NO: 566
  Synthetic polynucleotide

SEQ ID NO: 568 - DNA, 197 bp, Artificial Sequence
  Synthetic polynucleotide
atcatctcaccttgcctcctgcacctaaggatttccatcctgcaggagaacattctgttctagaagaacattctgttcttcgagaacattctgttctgacagaacattctgttctctaagaacattctgttctactagaacattctgttcttgcagaacattctgttctgtaggcgcgccatgcttcatcagactct

SEQ ID NO: 569 - DNA, 197 bp, Artificial Sequence; identical to SEQ ID NO: 568
  Synthetic polynucleotide

SEQ ID NO: 570 - DNA, 148 bp, Artificial Sequence
  Synthetic polynucleotide
atcatctcaccttgcctcctgtattgctctgattgcaccctgcaggaagataaagaaagataatcgaagataagacaagataactaaagataaactaagataatgcaagataagtaaagataaggcgcgccatgcttcatcagactct

SEQ ID NO: 571 - DNA, 148 bp, Artificial Sequence; identical to SEQ ID NO: 570
  Synthetic polynucleotide

SEQ ID NO: 572 - DNA, 185 bp, Artificial Sequence
  Synthetic polynucleotide
atcatctcaccttgcctcctggctgagatgtgggatcccctgcaggaaggtaattacctaatagaaaggtaattacctaattcgaaggtaattacctaatgacaaggtaattacctaatctaaaggtaattacctaatactaaggtaattacctaattgcggcgcgccatgcttcatcagactct

SEQ ID NO: 573 - DNA, 185 bp, Artificial Sequence; identical to SEQ ID NO: 572
  Synthetic polynucleotide

SEQ ID NO: 574 - DNA, 172 bp, Artificial Sequence
  Synthetic polynucleotide
atcatctcaccttgcctcctgagacacgttagcagaatcctgcaggaaaacaatggagaaaaacaatggtcgaaaacaatgggacaaaacaatggctaaaaacaatggactaaaacaatggtgcaaaacaatgggtaaaaacaatggggcgcgccatgcttcatcagactct

SEQ ID NO: 575 - DNA, 172 bp, Artificial Sequence; identical to SEQ ID NO: 574
  Synthetic polynucleotide

SEQ ID NO: 576 - DNA, 185 bp, Artificial Sequence
  Synthetic polynucleotide
atcatctcaccttgcctcctgtgttcagcgacgttacccctgcagggatggactttggactcagagatggactttggactctcggatggactttggactcgacgatggactttggactcctagatggactttggactcactgatggactttggactctgcggcgcgccatgcttcatcagactct

SEQ ID NO: 577 - DNA, 185 bp, Artificial Sequence; identical to SEQ ID NO: 576
  Synthetic polynucleotide

SEQ ID NO: 578 - DNA, 197 bp, Artificial Sequence
  Synthetic polynucleotide
atcatctcaccttgcctcctgcagcctgagtaatcaagcctgcaggaagatggcggccgccagaaagatggcggccgcctcgaagatggcggccgccgacaagatggcggccgccctaaagatggcggccgccactaagatggcggccgcctgcaagatggcggccgccgtaggcgcgccatgcttcatcagactct

SEQ ID NO: 579 - DNA, 197 bp, Artificial Sequence; identical to SEQ ID NO: 578
  Synthetic polynucleotide

SEQ ID NO: 580 - DNA, 180 bp, Artificial Sequence
  Synthetic polynucleotide
atcatctcaccttgcctcctgggacaaaggtatgcgtgcctgcaggaaaataaacatagaaaaataaacattcgaaaataaacatgacaaaataaacatctaaaaataaacatactaaaataaacattgcaaaataaacatgtaaaaataaacatggcgcgccatgcttcatcagactct

SEQ ID NO: 581 - DNA, 180 bp, Artificial Sequence; identical to SEQ ID NO: 580
  Synthetic polynucleotide

SEQ ID NO: 582 - DNA, 190 bp, Artificial Sequence
  Synthetic polynucleotide
atcatctcaccttgcctcctggtgtgtctcacgttgctcctgcaggtcgctgtgtcattcagatcgctgtgtcattctcgtcgctgtgtcattcgactcgctgtgtcattcctatcgctgtgtcattcacttcgctgtgtcattctgctcgctgtgtcattcgtaggcgcgccatgcttcatcagactct

SEQ ID NO: 583 - DNA, 190 bp, Artificial Sequence; identical to SEQ ID NO: 582
  Synthetic polynucleotide

SEQ ID NO: 584 - DNA, 172 bp, Artificial Sequence
  Synthetic polynucleotide
atcatctcaccttgcctcctgcgggatttatgcttacccctgcagggggctttcccagagggctttccctcggggctttcccgacgggctttcccctagggctttcccactgggctttccctgcgggctttcccgtagggctttcccggcgcgccatgcttcatcagactct

SEQ ID NO: 585 - DNA, 172 bp, Artificial Sequence; identical to SEQ ID NO: 584
  Synthetic polynucleotide

SEQ ID NO: 586 - DNA, 156 bp, Artificial Sequence
  Synthetic polynucleotide
atcatctcaccttgcctcctgcggatcatctccaattccctgcaggctttgatcagactttgatctcgctttgatcgacctttgatcctactttgatcactctttgatctgcctttgatcgtactttgatcggcgcgccatgcttcatcagactct

SEQ ID NO: 587 - DNA, 156 bp, Artificial Sequence; identical to SEQ ID NO: 586
  Synthetic polynucleotide

SEQ ID NO: 588 - DNA, 156 bp, Artificial Sequence
  Synthetic polynucleotide
atcatctcaccttgcctcctggaattgacgttctcagacctgcaggaggtgtgaagaaggtgtgatcgaggtgtgagacaggtgtgactaaggtgtgaactaggtgtgatgcaggtgtgagtaaggtgtgaggcgcgccatgcttcatcagactct

SEQ ID NO: 589 - DNA, 156 bp, Artificial Sequence; identical to SEQ ID NO: 588
  Synthetic polynucleotide

SEQ ID NO: 590 - DNA, 156 bp, Artificial Sequence
  Synthetic polynucleotide
atcatctcaccttgcctcctgtccacaggatgagggcacctgcaggaccgttatagaaccgttattcgaccgttatgacaccgttatctaaccgttatactaccgttattgcaccgttatgtaaccgttatggcgcgccatgcttcatcagactct

SEQ ID NO: 591 - DNA, 156 bp, Artificial Sequence; identical to SEQ ID NO: 590
  Synthetic polynucleotide

SEQ ID NO: 592 - DNA, 156 bp, Artificial Sequence
  Synthetic polynucleotide
atcatctcaccttgcctcctgggtcatatatctcatctcctgcagggttaatgaagagttaatgatcggttaatgagacgttaatgactagttaatgaactgttaatgatgcgttaatgagtagttaatgaggcgcgccatgcttcatcagactct

SEQ ID NO: 593 - DNA, 156 bp, Artificial Sequence; identical to SEQ ID NO: 592
  Synthetic polynucleotide

SEQ ID NO: 594 - DNA, 197 bp, Artificial Sequence
  Synthetic polynucleotide
atcatctcaccttgcctcctgacgtcataaccctccgtcctgcagggacatgtctggacatgtcagagacatgtctggacatgtctcggacatgtctggacatgtcgacgacatgtctggacatgtcctagacatgtctggacatgtcactgacatgtctggacatgtctgcggcgcgccatgcttcatcagactct

SEQ ID NO: 595 - DNA, 197 bp, Artificial Sequence; identical to SEQ ID NO: 594
  Synthetic polynucleotide

SEQ ID NO: 596 - DNA, 172 bp, Artificial Sequence
  Synthetic polynucleotide
atcatctcaccttgcctcctgcaggtgaagctaatcaccctgcaggtgaccttgatagatgaccttgattcgtgaccttgatgactgaccttgatctatgaccttgatacttgaccttgattgctgaccttgatgtatgaccttgatggcgcgccatgcttcatcagactct

SEQ ID NO: 597 - DNA, 172 bp, Artificial Sequence; identical to SEQ ID NO: 596
  Synthetic polynucleotide

SEQ ID NO: 598 - DNA, 191 bp, Artificial Sequence
  Synthetic polynucleotide
atcatctcaccttgcctcctgtagccaggcgacttaaacctgcagggttgcgggtacagagtgttctagggaaagagttgcgggtacagagtgttctagggaatcggttgcgggtacagagtgttctagggaagacgttgcgggtacagagtgttctagggaactaggcgcgccatgcttcatcagactct

SEQ ID NO: 599 - DNA, 191 bp, Artificial Sequence; identical to SEQ ID NO: 598
  Synthetic polynucleotide

SEQ ID NO: 600 - DNA, 156 bp, Artificial Sequence
  Synthetic polynucleotide
atcatctcaccttgcctcctggtcgtcgaccctatttccctgcaggtaacaatgagataacaatgtcgtaacaatggactaacaatgctataacaatgacttaacaatgtgctaacaatggtataacaatgggcgcgccatgcttcatcagactct

SEQ ID NO: 601 - DNA, 156 bp, Artificial Sequence; identical to SEQ ID NO: 600
  Synthetic polynucleotide

SEQ ID NO: 602 - DNA, 185 bp, Artificial Sequence
  Synthetic polynucleotide
atcatctcaccttgcctcctgctgtagcgcactgagaccctgcaggaaagacctgtcaatacagaaaagacctgtcaatactcgaaagacctgtcaatacgacaaagacctgtcaatacctaaaagacctgtcaatacactaaagacctgtcaatactgcggcgcgccatgcttcatcagactct

SEQ ID NO: 603 - DNA, 185 bp, Artificial Sequence; identical to SEQ ID NO: 602
  Synthetic polynucleotide

SEQ ID NO: 604 - DNA, 180 bp, Artificial Sequence
  Synthetic polynucleotide
atcatctcaccttgcctcctgcagcataaacttgactacctgcaggaacgacgctttagaaacgacgcttttcgaacgacgctttgacaacgacgctttctaaacgacgctttactaacgacgcttttgcaacgacgctttgtaaacgacgctttggcgcgccatgcttcatcagactct

SEQ ID NO: 605 - DNA, 180 bp, Artificial Sequence; identical to SEQ ID NO: 604
  Synthetic polynucleotide

SEQ ID NO: 606 - DNA, 197 bp, Artificial Sequence
  Synthetic polynucleotide
atcatctcaccttgcctcctgcacaacgtaccgcactacctgcaggttctctccagtatgaagattctctccagtatgatcgttctctccagtatgagacttctctccagtatgactattctctccagtatgaactttctctccagtatgatgcttctctccagtatgagtaggcgcgccatgcttcatcagactct

SEQ ID NO: 607 - DNA, 197 bp, Artificial Sequence; identical to SEQ ID NO: 606
  Synthetic polynucleotide

SEQ ID NO: 608 - DNA, 188 bp, Artificial Sequence
  Synthetic polynucleotide
atcatctcaccttgcctcctgtcccgtgttgtgctcgtcctgcaggaattagcatagaagaaattagcatagatcgaattagcatagagacaattagcatagactaaattagcatagaactaattagcatagatgcaattagcatagagtaaattagcatagaggcgcgccatgcttcatcagactct

SEQ ID NO: 609 - DNA, 188 bp, Artificial Sequence; identical to SEQ ID NO: 608
  Synthetic polynucleotide

SEQ ID NO: 610 - DNA, 172 bp, Artificial Sequence
  Synthetic polynucleotide
atcatctcaccttgcctcctggaacgaggcgatgcgatcctgcaggcacaggtgttagacacaggtgtttcgcacaggtgttgaccacaggtgttctacacaggtgttactcacaggtgtttgccacaggtgttgtacacaggtgttggcgcgccatgcttcatcagactct

SEQ ID NO: 611 - DNA, 172 bp, Artificial Sequence; identical to SEQ ID NO: 610
  Synthetic polynucleotide

SEQ ID NO: 612 - DNA, 180 bp, Artificial Sequence
  Synthetic polynucleotide
atcatctcaccttgcctcctgagatcgcgtctgctaaccctgcaggtgacaggtgttagatgacaggtgtttcgtgacaggtgttgactgacaggtgttctatgacaggtgttacttgacaggtgtttgctgacaggtgttgtatgacaggtgttggcgcgccatgcttcatcagactct

SEQ ID NO: 613 - DNA, 180 bp, Artificial Sequence; identical to SEQ ID NO: 612
  Synthetic polynucleotide

SEQ ID NO: 614 - DNA, 185 bp, Artificial Sequence
  Synthetic polynucleotide
atcatctcaccttgcctcctgtgtctgtcctttggccacctgcagggaacaattgcagtgttagagaacaattgcagtgtttcggaacaattgcagtgttgacgaacaattgcagtgttctagaacaattgcagtgttactgaacaattgcagtgtttgcggcgcgccatgcttcatcagactct

SEQ ID NO: 615 - DNA, 185 bp, Artificial Sequence; identical to SEQ ID NO: 614
  Synthetic polynucleotide

SEQ ID NO: 616 - DNA, 197 bp, Artificial Sequence
  Synthetic polynucleotide
atcatctcaccttgcctcctgtatagccggtcgggtctcctgcaggctggccccgccccctagactggccccgcccccttcgctggccccgccccctgacctggccccgccccctctactggccccgccccctactctggccccgcccccttgcctggccccgccccctgtaggcgcgccatgcttcatcagactct

SEQ ID NO: 617 - DNA, 197 bp, Artificial Sequence; identical to SEQ ID NO: 616
  Synthetic polynucleotide

SEQ ID NO: 618 - DNA, 164 bp, Artificial Sequence
  Synthetic polynucleotide
atcatctcaccttgcctcctggtggccgcactgtaagtcctgcaggatgttcccaagaatgttcccatcgatgttcccagacatgttcccactaatgttcccaactatgttcccatgcatgttcccagtaatgttcccaggcgcgccatgcttcatcagactct

SEQ ID NO: 619 - DNA, 164 bp, Artificial Sequence; identical to SEQ ID NO: 618
  Synthetic polynucleotide

SEQ ID NO: 620 - DNA, 197 bp, Artificial Sequence
  Synthetic polynucleotide
atcatctcaccttgcctcctgagtatccttatacaggacctgcagggttgccatggcgacgagagttgccatggcgacgtcggttgccatggcgacggacgttgccatggcgacgctagttgccatggcgacgactgttgccatggcgacgtgcgttgccatggcgacggtaggcgcgccatgcttcatcagactct

SEQ ID NO: 621 - DNA, 197 bp, Artificial Sequence; identical to SEQ ID NO: 620
  Synthetic polynucleotide

SEQ ID NO: 622 - DNA, 191 bp, Artificial Sequence
  Synthetic polynucleotide
atcatctcaccttgcctcctgatctactgtatacaggacctgcaggccggcgccccctggtggagaccggcgccccctggtggtcgccggcgccccctggtgggacccggcgccccctggtggctaccggcgccccctggtggactccggcgccccctggtggtgcggcgcgccatgcttcatcagactct

SEQ ID NO: 623 - DNA, 191 bp, Artificial Sequence; identical to SEQ ID NO: 622
  Synthetic polynucleotide

SEQ ID NO: 624 - DNA, 188 bp, Artificial Sequence
  Synthetic polynucleotide
atcatctcaccttgcctcctggtattgtatggaaatggcctgcaggtttattaaccctagatttattaacccttcgtttattaaccctgactttattaaccctctatttattaaccctacttttattaacccttgctttattaaccctgtatttattaaccctggcgcgccatgcttcatcagactct

SEQ ID NO: 625 - DNA, 188 bp, Artificial Sequence; identical to SEQ ID NO: 624
  Synthetic polynucleotide

SEQ ID NO: 626 - DNA, 197 bp, Artificial Sequence
  Synthetic polynucleotide
atcatctcaccttgcctcctgcatgttatgttggtggtcctgcaggaaccctttgatctttagaaaccctttgatcttttcgaaccctttgatctttgacaaccctttgatctttctaaaccctttgatctttactaaccctttgatcttttgcaaccctttgatctttgtaggcgcgccatgcttcatcagactct

SEQ ID NO: 627 - DNA, 197 bp, Artificial Sequence; identical to SEQ ID NO: 626
  Synthetic polynucleotide

SEQ ID NO: 628 - DNA, 188 bp, Artificial Sequence
  Synthetic polynucleotide
atcatctcaccttgcctcctgacgttcctcgggatctgcctgcaggtctaaaaatagaagatctaaaaatagatcgtctaaaaatagagactctaaaaatagactatctaaaaatagaacttctaaaaatagatgctctaaaaatagagtatctaaaaatagaggcgcgccatgcttcatcagactct

SEQ ID NO: 629 - DNA, 188 bp, Artificial Sequence; identical to SEQ ID NO: 628
  Synthetic polynucleotide

SEQ ID NO: 630 - DNA, 185 bp, Artificial Sequence
  Synthetic polynucleotide
atcatctcaccttgcctcctgatgaccaatattgccgtcctgcagggtagtaattaatggaaagagtagtaattaatggaatcggtagtaattaatggaagacgtagtaattaatggaactagtagtaattaatggaaactgtagtaattaatggaatgcggcgcgccatgcttcatcagactct

SEQ ID NO: 631 - DNA, 185 bp, Artificial Sequence; identical to SEQ ID NO: 630
  Synthetic polynucleotide

SEQ ID NO: 632 - DNA, 197 bp, Artificial Sequence
  Synthetic polynucleotide
atcatctcaccttgcctcctgcctccacgatgtaggaacctgcagggcaattaaaaaccaattaagagcaattaaaaaccaattatcggcaattaaaaaccaattagacgcaattaaaaaccaattactagcaattaaaaaccaattaactgcaattaaaaaccaattatgcggcgcgccatgcttcatcagactct

SEQ ID NO: 633 - DNA, 197 bp, Artificial Sequence; identical to SEQ ID NO: 632
  Synthetic polynucleotide

SEQ ID NO: 634 - DNA, 156 bp, Artificial Sequence
  Synthetic polynucleotide
atcatctcaccttgcctcctggtcctagtggtattacgcctgcaggatgcaaatagaatgcaaattcgatgcaaatgacatgcaaatctaatgcaaatactatgcaaattgcatgcaaatgtaatgcaaatggcgcgccatgcttcatcagactct

SEQ ID NO: 635 - DNA, 156 bp, Artificial Sequence; identical to SEQ ID NO: 634
  Synthetic polynucleotide

SEQ ID NO: 636 - DNA, 164 bp, Artificial Sequence
  Synthetic polynucleotide
atcatctcaccttgcctcctgcatgcagagaaggataccctgcagggtggtgagtagagtggtgagttcggtggtgagtgacgtggtgagtctagtggtgagtactgtggtgagttgcgtggtgagtgtagtggtgagtggcgcgccatgcttcatcagactct

SEQ ID NO: 637 - DNA, 164 bp, Artificial Sequence; identical to SEQ ID NO: 636
  Synthetic polynucleotide

SEQ ID NO: 638 - DNA, 191 bp, Artificial Sequence
  Synthetic polynucleotide
atcatctcaccttgcctcctgtccagggtaaatccaaccctgcaggcggtacaccgtgtacccagacggtacaccgtgtaccctcgcggtacaccgtgtacccgaccggtacaccgtgtacccctacggtacaccgtgtacccactcggtacaccgtgtaccctgcggcgcgccatgcttcatcagactct

SEQ ID NO: 639 - DNA, 191 bp, Artificial Sequence; identical to SEQ ID NO: 638
  Synthetic polynucleotide

SEQ ID NO: 640 - DNA, 188 bp, Artificial Sequence
  Synthetic polynucleotide
atcatctcaccttgcctcctgacttacttagcaaaccccctgcaggtgaccttgagctagatgaccttgagcttcgtgaccttgagctgactgaccttgagctctatgaccttgagctacttgaccttgagcttgctgaccttgagctgtatgaccttgagctggcgcgccatgcttcatcagactct

SEQ ID NO: 641 - DNA, 188 bp, Artificial Sequence; identical to SEQ ID NO: 640
  Synthetic polynucleotide

SEQ ID NO: 642 - DNA, 196 bp, Artificial Sequence
  Synthetic polynucleotide
atcatctcaccttgcctcctgaagaaggccctataggacctgcaggggccataaatcacagaggccataaatcactcgggccataaatcacgacggccataaatcacctaggccataaatcacactggccataaatcactgcggccataaatcacgtaggccataaatcacggcgcgccatgcttcatcagactct

SEQ ID NO: 643 - DNA, 196 bp, Artificial Sequence; identical to SEQ ID NO: 642
  Synthetic polynucleotide

SEQ ID NO: 644 - DNA, 164 bp, Artificial Sequence
  Synthetic polynucleotide
atcatctcaccttgcctcctgtgagctcggattgactacctgcaggaaggaagtaagaaaggaagtatcgaaggaagtagacaaggaagtactaaaggaagtaactaaggaagtatgcaaggaagtagtaaaggaagtaggcgcgccatgcttcatcagactct

SEQ ID NO: 645 - DNA, 164 bp, Artificial Sequence; identical to SEQ ID NO: 644
  Synthetic polynucleotide

SEQ ID NO: 646 - DNA, 190 bp, Artificial Sequence
  Synthetic polynucleotide
atcatctcaccttgcctcctgcagacgcttaatccgatcctgcaggggcgctgtccggggagaggcgctgtccggggtcgggcgctgtccgggggacggcgctgtccggggctaggcgctgtccggggactggcgctgtccggggtgcggcgctgtccgggggtaggcgcgccatgcttcatcagactct

SEQ ID NO: 647 - DNA, 190 bp, Artificial Sequence; identical to SEQ ID NO: 646
  Synthetic polynucleotide

SEQ ID NO: 648 - DNA, 188 bp, Artificial Sequence
  Synthetic polynucleotide
atcatctcaccttgcctcctgggtagtcactgtacgcccctgcagggatgacgtcatcagagatgacgtcatctcggatgacgtcatcgacgatgacgtcatcctagatgacgtcatcactgatgacgtcatctgcgatgacgtcatcgtagatgacgtcatcggcgcgccatgcttcatcagactct

SEQ ID NO: 649 - DNA, 188 bp, Artificial Sequence; identical to SEQ ID NO: 648
  Synthetic polynucleotide

SEQ ID NO: 650 - DNA, 172 bp, Artificial Sequence
  Synthetic polynucleotide
atcatctcaccttgcctcctgtacctcaagccattgctcctgcaggactaattaccagaactaattacctcgactaattaccgacactaattaccctaactaattaccactactaattacctgcactaattaccgtaactaattaccggcgcgccatgcttcatcagactct

SEQ ID NO: 651 - DNA, 172 bp, Artificial Sequence; identical to SEQ ID NO: 650
  Synthetic polynucleotide

SEQ ID NO: 652 - DNA, 172 bp, Artificial Sequence
  Synthetic polynucleotide
atcatctcaccttgcctcctgaagaatccaacagataccctgcagggtacccgcatagagtacccgcattcggtacccgcatgacgtacccgcatctagtacccgcatactgtacccgcattgcgtacccgcatgtagtacccgcatggcgcgccatgcttcatcagactct

SEQ ID NO: 653 - DNA, 172 bp, Artificial Sequence; identical to SEQ ID NO: 652
  Synthetic polynucleotide

SEQ ID NO: 654 - DNA, 156 bp, Artificial Sequence
  Synthetic polynucleotide
atcatctcaccttgcctcctgtagtcaaagaatggatccctgcaggaggagcacagaaggagcactcgaggagcacgacaggagcacctaaggagcacactaggagcactgcaggagcacgtaaggagcacggcgcgccatgcttcatcagactct

SEQ ID NO: 655 - DNA, 156 bp, Artificial Sequence; identical to SEQ ID NO: 654
  Synthetic polynucleotide

SEQ ID NO: 656 - DNA, 198 bp, Artificial Sequence
  Synthetic polynucleotide
atcatctcaccttgcctcctggatgatgaagggccttccctgcaggggcagagggcaaaggtcagggggagaggcagagggcaaaggtcagggggtcgggcagagggcaaaggtcaggggggacggcagagggcaaaggtcagggggctaggcagagggcaaaggtcagggggggcgcgccatgcttcatcagactct

SEQ ID NO: 657 - DNA, 198 bp, Artificial Sequence; identical to SEQ ID NO: 656
  Synthetic polynucleotide

SEQ ID NO: 658 - DNA, 172 bp, Artificial Sequence
  Synthetic polynucleotide
atcatctcaccttgcctcctgcctcgaggtcttggtaacctgcaggtgcgtgcgtgagatgcgtgcgtgtcgtgcgtgcgtggactgcgtgcgtgctatgcgtgcgtgacttgcgtgcgtgtgctgcgtgcgtggtatgcgtgcgtgggcgcgccatgcttcatcagactct

SEQ ID NO: 659 - DNA, 172 bp, Artificial Sequence; identical to SEQ ID NO: 658
  Synthetic polynucleotide

SEQ ID NO: 660 - DNA, 186 bp, Artificial Sequence
  Synthetic polynucleotide
atcatctcaccttgcctcctgacagttccagggtggctcctgcagggggggtcacccagaggtcacagagggggtcacccagaggtcactcggggggtcacccagaggtcacgacgggggtcacccagaggtcacctagggggtcacccagaggtcacactggcgcgccatgcttcatcagactct

SEQ ID NO: 661 - DNA, 186 bp, Artificial Sequence; identical to SEQ ID NO: 660
  Synthetic polynucleotide

SEQ ID NO: 662 - DNA, 197 bp, Artificial Sequence
  Synthetic polynucleotide
atcatctcaccttgcctcctgttcgacggtgagatggacctgcaggatgaataacattcatagaatgaataacattcattcgatgaataacattcatgacatgaataacattcatctaatgaataacattcatactatgaataacattcattgcatgaataacattcatgtaggcgcgccatgcttcatcagactct

SEQ ID NO: 663 - DNA, 197 bp, Artificial Sequence; identical to SEQ ID NO: 662
  Synthetic polynucleotide

SEQ ID NO: 664 - DNA, 190 bp, Artificial Sequence
  Synthetic polynucleotide
atcatctcaccttgcctcctgcaccatcgtactgaactcctgcaggaggggatttccaggagaaggggatttccaggtcgaggggatttccagggacaggggatttccaggctaaggggatttccaggactaggggatttccaggtgcaggggatttccagggtaggcgcgccatgcttcatcagactct

SEQ ID NO: 665 - DNA, 190 bp, Artificial Sequence; identical to SEQ ID NO: 664
  Synthetic polynucleotide

SEQ ID NO: 666 - DNA, 172 bp, Artificial Sequence
  Synthetic polynucleotide
atcatctcaccttgcctcctggtttggctatattacgtcctgcaggatcaccccatagaatcaccccattcgatcaccccatgacatcaccccatctaatcaccccatactatcaccccattgcatcaccccatgtaatcaccccatggcgcgccatgcttcatcagactct

SEQ ID NO: 667 - DNA, 172 bp, Artificial Sequence; identical to SEQ ID NO: 666
  Synthetic polynucleotide

SEQ ID NO: 668 - DNA, 197 bp, Artificial Sequence
  Synthetic polynucleotide
atcatctcaccttgcctcctgtttgtgtccagcctggtcctgcaggacgtttgtggttagcagaacgtttgtggttagctcgacgtttgtggttagcgacacgtttgtggttagcctaacgtttgtggttagcactacgtttgtggttagctgcacgtttgtggttagcgtaggcgcgccatgcttcatcagactct

SEQ ID NO: 669 - DNA, 197 bp, Artificial Sequence; identical to SEQ ID NO: 668
  Synthetic polynucleotide

SEQ ID NO: 670 - DNA, 197 bp, Artificial Sequence
  Synthetic polynucleotide
atcatctcaccttgcctcctgataatgcacaccgttctcctgcaggccagtatgaattctcagaccagtatgaattctctcgccagtatgaattctcgacccagtatgaattctcctaccagtatgaattctcactccagtatgaattctctgcccagtatgaattctcgtaggcgcgccatgcttcatcagactct

SEQ ID NO: 671 - DNA, 197 bp, Artificial Sequence; identical to SEQ ID NO: 670
  Synthetic polynucleotide

SEQ ID NO: 672 - DNA, 196 bp, Artificial Sequence
  Synthetic polynucleotide
atcatctcaccttgcctcctgagcgcagagcggacatacctgcaggtaacgacacgtgcagataacgacacgtgctcgtaacgacacgtgcgactaacgacacgtgcctataacgacacgtgcacttaacgacacgtgctgctaacgacacgtgcgtataacgacacgtgcggcgcgccatgcttcatcagactct

SEQ ID NO: 673 - DNA, 196 bp, Artificial Sequence; identical to SEQ ID NO: 672
  Synthetic polynucleotide

SEQ ID NO: 674 - DNA, 197 bp, Artificial Sequence
  Synthetic polynucleotide
atcatctcaccttgcctcctgacggaatcagtctattccctgcagggatttcctggaatttagagatttcctggaattttcggatttcctggaatttgacgatttcctggaatttctagatttcctggaatttactgatttcctggaattttgcgatttcctggaatttgtaggcgcgccatgcttcatcagactct

SEQ ID NO: 675 - DNA, 197 bp, Artificial Sequence; identical to SEQ ID NO: 674
  Synthetic polynucleotide

SEQ ID NO: 676 - DNA, 196 bp, Artificial Sequence
  Synthetic polynucleotide
atcatctcaccttgcctcctgtagtcctggtgggtacacctgcaggaggtgctatttttagcaccggaagaaggtgctatttttagcaccggatcgaggtgctatttttagcaccggagacaggtgctatttttagcaccggactaaggtgctatttttagcaccggaactggcgcgccatgcttcatcagactct

SEQ ID NO: 677 - DNA, 196 bp, Artificial Sequence; identical to SEQ ID NO: 676
  Synthetic polynucleotide

SEQ ID NO: 678 - DNA, 172 bp, Artificial Sequence
  Synthetic polynucleotide
atcatctcaccttgcctcctgtaccacctatggtgtgccctgcaggtatgaattatagatatgaattattcgtatgaattatgactatgaattatctatatgaattatacttatgaattattgctatgaattatgtatatgaattatggcgcgccatgcttcatcagactct

SEQ ID NO: 679 - DNA, 172 bp, Artificial Sequence; identical to SEQ ID NO: 678
  Synthetic polynucleotide

SEQ ID NO: 680 - DNA, 191 bp, Artificial Sequence
  Synthetic polynucleotide
atcatctcaccttgcctcctgaggtatgcgaagcctggcctgcaggtaaatagataccccataagataaatagataccccatatcgtaaatagataccccatagactaaatagataccccatactataaatagataccccataacttaaatagataccccatatgcggcgcgccatgcttcatcagactct

SEQ ID NO: 681 - DNA, 191 bp, Artificial Sequence; identical to SEQ ID NO: 680
  Synthetic polynucleotide

SEQ ID NO: 682 - DNA, 148 bp, Artificial Sequence
  Synthetic polynucleotide
atcatctcaccttgcctcctgcctgggcatacttaattcctgcaggttaattgagattaattgtcgttaattggacttaattgctattaattgactttaattgtgcttaattggtattaattgggcgcgccatgcttcatcagactct

SEQ ID NO: 683 - DNA, 148 bp, Artificial Sequence; identical to SEQ ID NO: 682
  Synthetic polynucleotide

SEQ ID NO: 684 - DNA, 199 bp, Artificial Sequence
  Synthetic polynucleotide
atcatctcaccttgcctcctgctattagggactccaagcctgcagggaacagatcaaactttagcttcaatacaaagagaacagatcaaactttagcttcaatacaatcggaacagatcaaactttagcttcaatacaagacgaacagatcaaactttagcttcaatacaactaggcgcgccatgcttcatcagactct

SEQ ID NO: 685 - DNA, 199 bp, Artificial Sequence; identical to SEQ ID NO: 684
  Synthetic polynucleotide

SEQ ID NO: 686 - DNA, 148 bp, Artificial Sequence
  Synthetic polynucleotide
atcatctcaccttgcctcctgtgtccatgaaaggtcttcctgcaggttaattaagattaattatcgttaattagacttaattactattaattaactttaattatgcttaattagtattaattaggcgcgccatgcttcatcagactct

SEQ ID NO: 687 - DNA, 148 bp, Artificial Sequence; identical to SEQ ID NO: 686
  Synthetic polynucleotide

SEQ ID NO: 688 - DNA, 156 bp, Artificial Sequence
  Synthetic polynucleotide
atcatctcaccttgcctcctggaaatgcgtttatctgccctgcaggataatgaaagaataatgaatcgataatgaagacataatgaactaataatgaaactataatgaatgcataatgaagtaataatgaaggcgcgccatgcttcatcagactct

SEQ ID NO: 689 - DNA, 156 bp, Artificial Sequence; identical to SEQ ID NO: 688
  Synthetic polynucleotide

SEQ ID NO: 690 - DNA, 185 bp, Artificial Sequence
  Synthetic polynucleotide
atcatctcaccttgcctcctgttagtttcaccatgtcgcctgcaggaaagacctgtcaatccagaaaagacctgtcaatcctcgaaagacctgtcaatccgacaaagacctgtcaatccctaaaagacctgtcaatccactaaagacctgtcaatcctgcggcgcgccatgcttcatcagactct

SEQ ID NO: 691 - DNA, 185 bp, Artificial Sequence; identical to SEQ ID NO: 690
  Synthetic polynucleotide

SEQ ID NO: 692 - DNA, 190 bp, Artificial Sequence
  Synthetic polynucleotide
atcatctcaccttgcctcctgaaagggacgtcagagggcctgcaggccatttcctggaaaagaccatttcctggaaatcgccatttcctggaaagacccatttcctggaaactaccatttcctggaaaactccatttcctggaaatgcccatttcctggaaagtaggcgcgccatgcttcatcagactct

SEQ ID NO: 693 - DNA, 190 bp, Artificial Sequence; identical to SEQ ID NO: 692
  Synthetic polynucleotide

SEQ ID NO: 694 - DNA, 191 bp, Artificial Sequence
  Synthetic polynucleotide
atcatctcaccttgcctcctgtgctgcactgccgaatacctgcaggtaacggttataacggccagataacggttataacggcctcgtaacggttataacggccgactaacggttataacggccctataacggttataacggccacttaacggttataacggcctgcggcgcgccatgcttcatcagactct

SEQ ID NO: 695 - DNA, 191 bp, Artificial Sequence; identical to SEQ ID NO: 694
  Synthetic polynucleotide

SEQ ID NO: 696 - DNA, 185 bp, Artificial Sequence
  Synthetic polynucleotide
atcatctcaccttgcctcctgtctcgaaattctcgcttcctgcaggaccgttaaaaccgttaagaaccgttaaaaccgttatcgaccgttaaaaccgttagacaccgttaaaaccgttactaaccgttaaaaccgttaactaccgttaaaaccgttatgcggcgcgccatgcttcatcagactct

SEQ ID NO: 697 - DNA, 185 bp, Artificial Sequence; identical to SEQ ID NO: 696
  Synthetic polynucleotide

SEQ ID NO: 698 - DNA, 180 bp, Artificial Sequence
  Synthetic polynucleotide
atcatctcaccttgcctcctgcgtctggtatgtaccctcctgcagggtgtagttaatagagtgtagttaattcggtgtagttaatgacgtgtagttaatctagtgtagttaatactgtgtagttaattgcgtgtagttaatgtagtgtagttaatggcgcgccatgcttcatcagactct

SEQ ID NO: 699 - DNA, 180 bp, Artificial Sequence; identical to SEQ ID NO: 698
  Synthetic polynucleotide

SEQ ID NO: 700 - DNA, 188 bp, Artificial Sequence
  Synthetic polynucleotide
atcatctcaccttgcctcctgactcacggaactcccagcctgcaggccgattttttccagaccgattttttcctcgccgattttttccgacccgattttttccctaccgattttttccactccgattttttcctgcccgattttttccgtaccgattttttccggcgcgccatgcttcatcagactct

SEQ ID NO: 701 - DNA, 188 bp, Artificial Sequence; identical to SEQ ID NO: 700
  Synthetic polynucleotide

SEQ ID NO: 702 - DNA, 156 bp, Artificial Sequence
  Synthetic polynucleotide
atcatctcaccttgcctcctggttatagccgatttggacctgcaggacatatggagaacatatggtcgacatatgggacacatatggctaacatatggactacatatggtgcacatatgggtaacatatggggcgcgccatgcttcatcagactct

SEQ ID NO: 703 - DNA, 156 bp, Artificial Sequence; identical to SEQ ID NO: 702
  Synthetic polynucleotide

SEQ ID NO: 704 - DNA, 164 bp, Artificial Sequence
  Synthetic polynucleotide
atcatctcaccttgcctcctggaatgaagtgcctgtatcctgcagggatccgggtagagatccgggttcggatccgggtgacgatccgggtctagatccgggtactgatccgggttgcgatccgggtgtagatccgggtggcgcgccatgcttcatcagactct

SEQ ID NO: 705 - DNA, 164 bp, Artificial Sequence; identical to SEQ ID NO: 704
  Synthetic polynucleotide

SEQ ID NO: 706 - DNA, 190 bp, Artificial Sequence
  Synthetic polynucleotide
atcatctcaccttgcctcctggaatggaccttgcatcgcctgcaggaactcatgcgtgaaagaaactcatgcgtgaatcgaactcatgcgtgaagacaactcatgcgtgaactaaactcatgcgtgaaactaactcatgcgtgaatgcaactcatgcgtgaagtaggcgcgccatgcttcatcagactct

SEQ ID NO: 707 - DNA, 190 bp, Artificial Sequence; identical to SEQ ID NO: 706
  Synthetic polynucleotide

SEQ ID NO: 708 - DNA, 180 bp, Artificial Sequence
  Synthetic polynucleotide
atcatctcaccttgcctcctggggtttactgaactaaacctgcaggggggattccccagaggggattcccctcgggggattccccgacggggattccccctaggggattccccactggggattcccctgcggggattccccgtaggggattccccggcgcgccatgcttcatcagactct

SEQ ID NO: 709 - DNA, 180 bp, Artificial Sequence; identical to SEQ ID NO: 708
  Synthetic polynucleotide

SEQ ID NO: 710 - DNA, 191 bp, Artificial Sequence
  Synthetic polynucleotide
atcatctcaccttgcctcctgttatgaattctggccaacctgcagggtccactaattagtggtagagtccactaattagtggttcggtccactaattagtggtgacgtccactaattagtggtctagtccactaattagtggtactgtccactaattagtggttgcggcgcgccatgcttcatcagactct

SEQ ID NO: 711 - DNA, 191 bp, Artificial Sequence; identical to SEQ ID NO: 710
  Synthetic polynucleotide

SEQ ID NO: 712 - DNA, 190 bp, Artificial Sequence
  Synthetic polynucleotide
atcatctcaccttgcctcctgatgtttctgtagatcagcctgcaggtgtcaatatttacaagatgtcaatatttacatcgtgtcaatatttacagactgtcaatatttacactatgtcaatatttacaacttgtcaatatttacatgctgtcaatatttacagtaggcgcgccatgcttcatcagactct

SEQ ID NO: 713 - DNA, 190 bp, Artificial Sequence; identical to SEQ ID NO: 712
  Synthetic polynucleotide

SEQ ID NO: 714 - DNA, 196 bp, Artificial Sequence
  Synthetic polynucleotide
atcatctcaccttgcctcctgacgtgctctgcctacatcctgcaggaaaagtaggtcagagaaaaagtaggtcagtcgaaaagtaggtcaggacaaaagtaggtcagctaaaaagtaggtcagactaaaagtaggtcagtgcaaaagtaggtcaggtaaaaagtaggtcagggcgcgccatgcttcatcagactct

SEQ ID NO: 715 - DNA, 196 bp, Artificial Sequence; identical to SEQ ID NO: 714
  Synthetic polynucleotide

SEQ ID NO: 716 - DNA, 197 bp, Artificial Sequence
  Synthetic polynucleotide
atcatctcaccttgcctcctggcagaaaccttccgctccctgcaggggcgggaaatttgaaagaggcgggaaatttgaatcgggcgggaaatttgaagacggcgggaaatttgaactaggcgggaaatttgaaactggcgggaaatttgaatgcggcgggaaatttgaagtaggcgcgccatgcttcatcagactct

SEQ ID NO: 717 - DNA, 197 bp, Artificial Sequence; identical to SEQ ID NO: 716
  Synthetic polynucleotide

SEQ ID NO: 718 - DNA, 186 bp, Artificial Sequence
  Synthetic polynucleotide
atcatctcaccttgcctcctgatacagacagaatactccctgcaggagtaggtcaccgtgacctacagaagtaggtcaccgtgacctactcgagtaggtcaccgtgacctacgacagtaggtcaccgtgacctacctaagtaggtcaccgtgacctacactggcgcgccatgcttcatcagactct

SEQ ID NO: 719 - DNA, 186 bp, Artificial Sequence; identical to SEQ ID NO: 718
  Synthetic polynucleotide

SEQ ID NO: 720 - DNA, 164 bp, Artificial Sequence
  Synthetic polynucleotide
atcatctcaccttgcctcctggtacgctaccggtaatgcctgcaggcgttcgaaaagacgttcgaaatcgcgttcgaaagaccgttcgaaactacgttcgaaaactcgttcgaaatgccgttcgaaagtacgttcgaaaggcgcgccatgcttcatcagactct

SEQ ID NO: 721 - DNA, 164 bp, Artificial Sequence; identical to SEQ ID NO: 720
  Synthetic polynucleotide

SEQ ID NO: 722 - DNA, 197 bp, Artificial Sequence
  Synthetic polynucleotide
atcatctcaccttgcctcctgtctatgcttcatgccgtcctgcaggactcacgcaatactgagaactcacgcaatactgtcgactcacgcaatactggacactcacgcaatactgctaactcacgcaatactgactactcacgcaatactgtgcactcacgcaatactggtaggcgcgccatgcttcatcagactct

SEQ ID NO: 723 - DNA, 197 bp, Artificial Sequence; identical to SEQ ID NO: 722
  Synthetic polynucleotide

SEQ ID NO: 724 - DNA, 190 bp, Artificial Sequence
  Synthetic polynucleotide
atcatctcaccttgcctcctgtactacaacctgaagagcctgcaggactaattacctcaaagaactaattacctcaatcgactaattacctcaagacactaattacctcaactaactaattacctcaaactactaattacctcaatgcactaattacctcaagtaggcgcgccatgcttcatcagactct

SEQ ID NO: 725 - DNA, 190 bp, Artificial Sequence; identical to SEQ ID NO: 724
  Synthetic polynucleotide

SEQ ID NO: 726 - DNA, 185 bp, Artificial Sequence
  Synthetic polynucleotide
atcatctcaccttgcctcctggtcacttagaggatccgcctgcaggtcgtacccgcatcattagatcgtacccgcatcatttcgtcgtacccgcatcattgactcgtacccgcatcattctatcgtacccgcatcattacttcgtacccgcatcatttgcggcgcgccatgcttcatcagactct

SEQ ID NO: 727 - DNA, 185 bp, Artificial Sequence; identical to SEQ ID NO: 726
  Synthetic polynucleotide

SEQ ID NO: 728 - DNA, 191 bp, Artificial Sequence
  Synthetic polynucleotide
atcatctcaccttgcctcctgaagttagccctgtcgatcctgcaggctttcccacaacacgacagactttcccacaacacgactcgctttcccacaacacgacgacctttcccacaacacgacctactttcccacaacacgacactctttcccacaacacgactgcggcgcgccatgcttcatcagactct

SEQ ID NO: 729 - DNA, 191 bp, Artificial Sequence; identical to SEQ ID NO: 728
  Synthetic polynucleotide

SEQ ID NO: 730 - DNA, 191 bp, Artificial Sequence
  Synthetic polynucleotide
atcatctcaccttgcctcctgttaaataggcctctgaccctgcagggtgctgaccccgcagccttcgagagtgctgaccccgcagccttcgtcggtgctgaccccgcagccttcggacgtgctgaccccgcagccttcgctagtgctgaccccgcagccttcgactggcgcgccatgcttcatcagactct

SEQ ID NO: 731 - DNA, 191 bp, Artificial Sequence; identical to SEQ ID NO: 730
  Synthetic polynucleotide

SEQ ID NO: 732 - DNA, 140 bp, Artificial Sequence
  Synthetic polynucleotide
atcatctcaccttgcctcctgattcctgaccaacttcgcctgcaggtggggaagatggggatcgtggggagactggggactatggggaacttggggatgctggggagtatggggaggcgcgccatgcttcatcagactct

SEQ ID NO: 733 - DNA, 140 bp, Artificial Sequence; identical to SEQ ID NO: 732
  Synthetic polynucleotide

SEQ ID NO: 734 - DNA, 156 bp, Artificial Sequence
  Synthetic polynucleotide
atcatctcaccttgcctcctggatccaggcttgaagtgcctgcaggaagttcacagaaagttcactcgaagttcacgacaagttcacctaaagttcacactaagttcactgcaagttcacgtaaagttcacggcgcgccatgcttcatcagactct

SEQ ID NO: 735 - DNA, 156 bp, Artificial Sequence; identical to SEQ ID NO: 734
  Synthetic polynucleotide

SEQ ID NO: 736 - DNA, 197 bp, Artificial Sequence
  Synthetic polynucleotide
atcatctcaccttgcctcctgccactgtacagacagaacctgcaggctggcactgtgccaaagactggcactgtgccaatcgctggcactgtgccaagacctggcactgtgccaactactggcactgtgccaaactctggcactgtgccaatgcctggcactgtgccaagtaggcgcgccatgcttcatcagactct

SEQ ID NO: 737 - DNA, 197 bp, Artificial Sequence; identical to SEQ ID NO: 736
  Synthetic polynucleotide

SEQ ID NO: 738 - DNA, 200 bp, Artificial Sequence
  Synthetic polynucleotide
atcatctcaccttgcctcctgctggagctgtagcgtcacctgcaggacaggtcactgtgacctgaagaacaggtcactgtgacctgatcgacaggtcactgtgacctgagacacaggtcactgtgacctgactaacaggtcactgtgacctgaactacaggtcactgtgacctgaggcgcgccatgcttcatcagactct

SEQ ID NO: 739 - DNA, 200 bp, Artificial Sequence; identical to SEQ ID NO: 738
  Synthetic polynucleotide

SEQ ID NO: 740 - DNA, 200 bp, Artificial Sequence
  Synthetic polynucleotide
atcatctcaccttgcctcctggttcctaggcagatcttcctgcaggaaaaattaacccaaaatccaacctcaccccagaaaaaattaacccaaaatccaacctcacccctcgaaaaattaacccaaaatccaacctcaccccgacaaaaattaacccaaaatccaacctcaccccggcgcgccatgcttcatcagactct

SEQ ID NO: 741 - DNA, 200 bp, Artificial Sequence; identical to SEQ ID NO: 740
  Synthetic polynucleotide

SEQ ID NO: 742 - DNA, 164 bp, Artificial Sequence
  Synthetic polynucleotide
atcatctcaccttgcctcctgtagtgtaggcagtaatgcctgcagggggattaagagagggattaagtcggggattaaggacgggattaagctagggattaagactgggattaagtgcgggattaaggtagggattaagggcgcgccatgcttcatcagactct

SEQ ID NO: 743 - DNA, 164 bp, Artificial Sequence; identical to SEQ ID NO: 742
  Synthetic polynucleotide

SEQ ID NO: 744 - DNA, 164 bp, Artificial Sequence
  Synthetic polynucleotide
atcatctcaccttgcctcctgtgaacacttcttgcgtccctgcaggttgacaggtagattgacaggttcgttgacaggtgacttgacaggtctattgacaggtactttgacaggttgcttgacaggtgtattgacaggtggcgcgccatgcttcatcagactct

SEQ ID NO: 745 - DNA, 164 bp, Artificial Sequence; identical to SEQ ID NO: 744
  Synthetic polynucleotide

SEQ ID NO: 746 - DNA, 180 bp, Artificial Sequence
  Synthetic polynucleotide
atcatctcaccttgcctcctgaccgaacagccatgggacctgcagggggtgactcatagagggtgactcattcggggtgactcatgacgggtgactcatctagggtgactcatactgggtgactcattgcgggtgactcatgtagggtgactcatggcgcgccatgcttcatcagactct

SEQ ID NO: 747 - DNA, 180 bp, Artificial Sequence; identical to SEQ ID NO: 746
  Synthetic polynucleotide

SEQ ID NO: 748 - DNA, 172 bp, Artificial Sequence
  Synthetic polynucleotide
atcatctcaccttgcctcctggtcttaggatgatccgacctgcagggccggaagtgagagccggaagtgtcggccggaagtggacgccggaagtgctagccggaagtgactgccggaagtgtgcgccggaagtggtagccggaagtgggcgcgccatgcttcatcagactct

SEQ ID NO: 749 - DNA, 172 bp, Artificial Sequence; identical to SEQ ID NO: 748
  Synthetic polynucleotide

SEQ ID NO: 750 - DNA, 185 bp, Artificial Sequence
  Synthetic polynucleotide
atcatctcaccttgcctcctgagaaccacagtatgcagcctgcaggatgtattaattaagtaagaatgtattaattaagtatcgatgtattaattaagtagacatgtattaattaagtactaatgtattaattaagtaactatgtattaattaagtatgcggcgcgccatgcttcatcagactct

SEQ ID NO: 751 - DNA, 185 bp, Artificial Sequence; identical to SEQ ID NO: 750
  Synthetic polynucleotide

SEQ ID NO: 752 - DNA, 190 bp, Artificial Sequence
  Synthetic polynucleotide
atcatctcaccttgcctcctgtctaccgaactaaatcccctgcaggcgaccacgtggtcaagacgaccacgtggtcatcgcgaccacgtggtcagaccgaccacgtggtcactacgaccacgtggtcaactcgaccacgtggtcatgccgaccacgtggtcagtaggcgcgccatgcttcatcagactct

SEQ ID NO: 753 - DNA, 190 bp, Artificial Sequence; identical to SEQ ID NO: 752
  Synthetic polynucleotide

SEQ ID NO: 754 - DNA, 191 bp, Artificial Sequence
  Synthetic polynucleotide
atcatctcaccttgcctcctgccttgctttagtcgctacctgcaggcagccgacacgtgccccagacagccgacacgtgcccctcgcagccgacacgtgccccgaccagccgacacgtgccccctacagccgacacgtgccccactcagccgacacgtgcccctgcggcgcgccatgcttcatcagactct

SEQ ID NO: 755 - DNA, 191 bp, Artificial Sequence; identical to SEQ ID NO: 754
  Synthetic polynucleotide

SEQ ID NO: 756 - DNA, 196 bp, Artificial Sequence
  Synthetic polynucleotide
atcatctcaccttgcctcctgaaacttgcgaacgggtccctgcaggttctataaatagaagattctataaatagatcgttctataaatagagacttctataaatagactattctataaatagaactttctataaatagatgcttctataaatagagtattctataaatagaggcgcgccatgcttcatcagactct

SEQ ID NO: 757 - DNA, 196 bp, Artificial Sequence; identical to SEQ ID NO: 756
  Synthetic polynucleotide

SEQ ID NO: 758 - DNA, 164 bp, Artificial Sequence
  Synthetic polynucleotide
atcatctcaccttgcctcctggtttctacatacgatgccctgcaggctgtttgctagactgtttgcttcgctgtttgctgacctgtttgctctactgtttgctactctgtttgcttgcctgtttgctgtactgtttgctggcgcgccatgcttcatcagactct

SEQ ID NO: 759 - DNA, 164 bp, Artificial Sequence; identical to SEQ ID NO: 758
  Synthetic polynucleotide

SEQ ID NO: 760 - DNA, 172 bp, Artificial Sequence
  Synthetic polynucleotide
atcatctcaccttgcctcctgtattgtgctaccgaaatcctgcaggaccacgtgctagaaccacgtgcttcgaccacgtgctgacaccacgtgctctaaccacgtgctactaccacgtgcttgcaccacgtgctgtaaccacgtgctggcgcgccatgcttcatcagactct

SEQ ID NO: 761 - DNA, 172 bp, Artificial Sequence; identical to SEQ ID NO: 760
  Synthetic polynucleotide

SEQ ID NO: 762 - DNA, 180 bp, Artificial Sequence
  Synthetic polynucleotide
atcatctcaccttgcctcctgaatgggttcggaaggcgcctgcaggtgacgtcatcgagatgacgtcatcgtcgtgacgtcatcggactgacgtcatcgctatgacgtcatcgacttgacgtcatcgtgctgacgtcatcggtatgacgtcatcgggcgcgccatgcttcatcagactct

SEQ ID NO: 763 - DNA, 180 bp, Artificial Sequence; identical to SEQ ID NO: 762
  Synthetic polynucleotide

SEQ ID NO: 764 - DNA, 180 bp, Artificial Sequence
  Synthetic polynucleotide
atcatctcaccttgcctcctgcgcccactggatataaacctgcaggttcacgcttgaagattcacgcttgatcgttcacgcttgagacttcacgcttgactattcacgcttgaactttcacgcttgatgcttcacgcttgagtattcacgcttgaggcgcgccatgcttcatcagactct

SEQ ID NO: 765 - DNA, 180 bp, Artificial Sequence; identical to SEQ ID NO: 764
  Synthetic polynucleotide

SEQ ID NO: 766 - DNA, 197 bp, Artificial Sequence
  Synthetic polynucleotide
atcatctcaccttgcctcctgtaatatgggatccgattcctgcagggcatgtcccgacatgagagcatgtcccgacatgtcggcatgtcccgacatggacgcatgtcccgacatgctagcatgtcccgacatgactgcatgtcccgacatgtgcgcatgtcccgacatggtaggcgcgccatgcttcatcagactct

SEQ ID NO: 767 - DNA, 197 bp, Artificial Sequence; identical to SEQ ID NO: 766
  Synthetic polynucleotide

SEQ ID NO: 768 - DNA, 164 bp, Artificial Sequence
  Synthetic polynucleotide
atcatctcaccttgcctcctgattgggtcgcttaaacacctgcaggagacagacaagaagacagacatcgagacagacagacagacagacactaagacagacaactagacagacatgcagacagacagtaagacagacaggcgcgccatgcttcatcagactct

SEQ ID NO: 769 - DNA, 164 bp, Artificial Sequence; identical to SEQ ID NO: 768
  Synthetic polynucleotide

SEQ ID NO: 770 - DNA, 148 bp, Artificial Sequence
  Synthetic polynucleotide
atcatctcaccttgcctcctggcttaacaccggtcgaccctgcaggagattggagaagattggtcgagattgggacagattggctaagattggactagattggtgcagattgggtaagattggggcgcgccatgcttcatcagactct

SEQ ID NO: 771 - DNA, 148 bp, Artificial Sequence; identical to SEQ ID NO: 770
  Synthetic polynucleotide

SEQ ID NO: 772 - DNA, 190 bp, Artificial Sequence
  Synthetic polynucleotide
atcatctcaccttgcctcctggcacccgacaataaccccctgcaggttcctttgatctttagattcctttgatcttttcgttcctttgatctttgacttcctttgatctttctattcctttgatctttactttcctttgatcttttgcttcctttgatctttgtaggcgcgccatgcttcatcagactct

SEQ ID NO: 773 - DNA, 190 bp, Artificial Sequence; identical to SEQ ID NO: 772
  Synthetic polynucleotide

SEQ ID NO: 774 - DNA, 180 bp, Artificial Sequence
  Synthetic polynucleotide
atcatctcaccttgcctcctgtacgcgaccaagtgtttcctgcaggaccgtgaccacagaaccgtgaccactcgaccgtgaccacgacaccgtgaccacctaaccgtgaccacactaccgtgaccactgcaccgtgaccacgtaaccgtgaccacggcgcgccatgcttcatcagactct

SEQ ID NO: 775 - DNA, 180 bp, Artificial Sequence; identical to SEQ ID NO: 774
  Synthetic polynucleotide

SEQ ID NO: 776 - DNA, 191 bp, Artificial Sequence
  Synthetic polynucleotide
atcatctcaccttgcctcctgtgacgctccacatagtgcctgcagggggtacacggtgtaccgagagggtacacggtgtaccgtcggggtacacggtgtaccggacgggtacacggtgtaccgctagggtacacggtgtaccgactgggtacacggtgtaccgtgcggcgcgccatgcttcatcagactct

SEQ ID NO: 777 - DNA, 191 bp, Artificial Sequence; identical to SEQ ID NO: 776
  Synthetic polynucleotide

SEQ ID NO: 778 - DNA, 190 bp, Artificial Sequence
  Synthetic polynucleotide
atcatctcaccttgcctcctgtaccgttgatgataagtcctgcaggcaaggtcattaaccagacaaggtcattaacctcgcaaggtcattaaccgaccaaggtcattaaccctacaaggtcattaaccactcaaggtcattaacctgccaaggtcattaaccgtaggcgcgccatgcttcatcagactct

SEQ ID NO: 779 - DNA, 190 bp, Artificial Sequence; identical to SEQ ID NO: 778
  Synthetic polynucleotide

SEQ ID NO: 780 - DNA, 180 bp, Artificial Sequence
  Synthetic polynucleotide
atcatctcaccttgcctcctgccaggagaatagcggctcctgcaggtgtttatttacagatgtttatttactcgtgtttatttacgactgtttatttacctatgtttatttacacttgtttatttactgctgtttatttacgtatgtttatttacggcgcgccatgcttcatcagactct

SEQ ID NO: 781 - DNA, 180 bp, Artificial Sequence; identical to SEQ ID NO: 780
  Synthetic polynucleotide

SEQ ID NO: 782 - DNA, 172 bp, Artificial Sequence
  Synthetic polynucleotide
atcatctcaccttgcctcctgtctgcagtcgaccagatcctgcaggtcacgtcaccagatcacgtcacctcgtcacgtcaccgactcacgtcaccctatcacgtcaccacttcacgtcacctgctcacgtcaccgtatcacgtcaccggcgcgccatgcttcatcagactct

SEQ ID NO: 783 - DNA, 172 bp, Artificial Sequence; identical to SEQ ID NO: 782
  Synthetic polynucleotide

SEQ ID NO: 784 - DNA, 197 bp, Artificial Sequence
  Synthetic polynucleotide
atcatctcaccttgcctcctggaatttattcgatggtccctgcaggccttatctgccccccccaagaccttatctgccccccccatcgccttatctgccccccccagacccttatctgccccccccactaccttatctgccccccccaactccttatctgccccccccatgcggcgcgccatgcttcatcagactct

SEQ ID NO: 785 - DNA, 197 bp, Artificial Sequence; identical to SEQ ID NO: 784
  Synthetic polynucleotide

SEQ ID NO: 786 - DNA, 156 bp, Artificial Sequence
  Synthetic polynucleotide
atcatctcaccttgcctcctgagggccgacatgtatcccctgcaggaggtgtcaagaaggtgtcatcgaggtgtcagacaggtgtcactaaggtgtcaactaggtgtcatgcaggtgtcagtaaggtgtcaggcgcgccatgcttcatcagactct

SEQ ID NO: 787 - DNA, 156 bp, Artificial Sequence; identical to SEQ ID NO: 786
  Synthetic polynucleotide

SEQ ID NO: 788 - DNA, 191 bp, Artificial Sequence
  Synthetic polynucleotide
atcatctcaccttgcctcctgtgatgctaatccttaaccctgcaggaactagggcaaaggtcaagaaactagggcaaaggtcatcgaactagggcaaaggtcagacaactagggcaaaggtcactaaactagggcaaaggtcaactaactagggcaaaggtcatgcggcgcgccatgcttcatcagactct

SEQ ID NO: 789 - DNA, 191 bp, Artificial Sequence; identical to SEQ ID NO: 788
  Synthetic polynucleotide

SEQ ID NO: 790 - DNA, 190 bp, Artificial Sequence
  Synthetic polynucleotide
atcatctcaccttgcctcctgctaactctcccaccggacctgcaggttcgctaattagccagattcgctaattagcctcgttcgctaattagccgacttcgctaattagccctattcgctaattagccactttcgctaattagcctgcttcgctaattagccgtaggcgcgccatgcttcatcagactct

SEQ ID NO: 791 - DNA, 190 bp, Artificial Sequence; identical to SEQ ID NO: 790
  Synthetic polynucleotide

SEQ ID NO: 792 - DNA, 156 bp, Artificial Sequence
  Synthetic polynucleotide
atcatctcaccttgcctcctgatcaggtttgggtttaccctgcaggttcattatagattcattattcgttcattatgacttcattatctattcattatactttcattattgcttcattatgtattcattatggcgcgccatgcttcatcagactct

SEQ ID NO: 793 - DNA, 156 bp, Artificial Sequence; identical to SEQ ID NO: 792
  Synthetic polynucleotide

SEQ ID NO: 794 - DNA, 197 bp, Artificial Sequence
  Synthetic polynucleotide
atcatctcaccttgcctcctgagtggtgagaagaactgcctgcaggagtgccatctagtggagaagtgccatctagtggtcgagtgccatctagtgggacagtgccatctagtggctaagtgccatctagtggactagtgccatctagtggtgcagtgccatctagtgggtaggcgcgccatgcttcatcagactct

SEQ ID NO: 795 - DNA, 197 bp, Artificial Sequence; identical to SEQ ID NO: 794
  Synthetic polynucleotide

SEQ ID NO: 796 - DNA, 191 bp, Artificial Sequence
  Synthetic polynucleotide
atcatctcaccttgcctcctgaataaagggatcagtgccctgcaggattttagttaactaaggagaattttagttaactaaggtcgattttagttaactaagggacattttagttaactaaggctaattttagttaactaaggactattttagttaactaaggtgcggcgcgccatgcttcatcagactct

SEQ ID NO: 797 - DNA, 191 bp, Artificial Sequence; identical to SEQ ID NO: 796
  Synthetic polynucleotide

SEQ ID NO: 798 - DNA, 180 bp, Artificial Sequence
  Synthetic polynucleotide
atcatctcaccttgcctcctggtgaattacccattccacctgcaggtttcacaccttagatttcacacctttcgtttcacaccttgactttcacaccttctatttcacaccttacttttcacacctttgctttcacaccttgtatttcacaccttggcgcgccatgcttcatcagactct

SEQ ID NO: 799 - DNA, 180 bp, Artificial Sequence; identical to SEQ ID NO: 798
  Synthetic polynucleotide

SEQ ID NO: 800 - DNA, 172 bp, Artificial Sequence
  Synthetic polynucleotide
atcatctcaccttgcctcctgccatgtcccagcgatgacctgcaggcactttcactagacactttcacttcgcactttcactgaccactttcactctacactttcactactcactttcacttgccactttcactgtacactttcactggcgcgccatgcttcatcagactct

SEQ ID NO: 801 - DNA, 172 bp, Artificial Sequence; identical to SEQ ID NO: 800
  Synthetic polynucleotide

SEQ ID NO: 802 - DNA, 196 bp, Artificial Sequence
  Synthetic polynucleotide
atcatctcaccttgcctcctggtctactagaatacctccctgcaggttccctagcaacaagattccctagcaacatcgttccctagcaacagacttccctagcaacactattccctagcaacaactttccctagcaacatgcttccctagcaacagtattccctagcaacaggcgcgccatgcttcatcagactct

SEQ ID NO: 803 - DNA, 196 bp, Artificial Sequence; identical to SEQ ID NO: 802
  Synthetic polynucleotide

SEQ ID NO: 804 - DNA, 186 bp, Artificial Sequence
  Synthetic polynucleotide
atcatctcaccttgcctcctggagaaagggtgtgattacctgcaggtgaattgtaaacaaagaggaagatgaattgtaaacaaagaggatcgtgaattgtaaacaaagaggagactgaattgtaaacaaagaggactatgaattgtaaacaaagaggaactggcgcgccatgcttcatcagactct

SEQ ID NO: 805 - DNA, 186 bp, Artificial Sequence; identical to SEQ ID NO: 804
  Synthetic polynucleotide

SEQ ID NO: 806 - DNA, 156 bp, Artificial Sequence
  Synthetic polynucleotide
atcatctcaccttgcctcctggtgttatcaaacagctccctgcaggaagtttcaagaaagtttcatcgaagtttcagacaagtttcactaaagtttcaactaagtttcatgcaagtttcagtaaagtttcaggcgcgccatgcttcatcagactct

SEQ ID NO: 807 - DNA, 156 bp, Artificial Sequence; identical to SEQ ID NO: 806
  Synthetic polynucleotide

SEQ ID NO: 808 - DNA, 191 bp, Artificial Sequence
  Synthetic polynucleotide
atcatctcaccttgcctcctggggtcgacaatccgcaacctgcagggaggtcaggtcaggtcaagagaggtcaggtcaggtcatcggaggtcaggtcaggtcagacgaggtcaggtcaggtcactagaggtcaggtcaggtcaactgaggtcaggtcaggtcatgcggcgcgccatgcttcatcagactct

SEQ ID NO: 809 - DNA, 191 bp, Artificial Sequence; identical to SEQ ID NO: 808
  Synthetic polynucleotide

SEQ ID NO: 810 - DNA, 191 bp, Artificial Sequence
  Synthetic polynucleotide
atcatctcaccttgcctcctggatattggatacgcatccctgcagggtgcactaattagtgcaagagtgcactaattagtgcatcggtgcactaattagtgcagacgtgcactaattagtgcactagtgcactaattagtgcaactgtgcactaattagtgcatgcggcgcgccatgcttcatcagactct

SEQ ID NO: 811 - DNA, 191 bp, Artificial Sequence; identical to SEQ ID NO: 810
  Synthetic polynucleotide

SEQ ID NO: 812 - DNA, 197 bp, Artificial Sequence
  Synthetic polynucleotide
atcatctcaccttgcctcctgacacatacccgtcagggcctgcaggggttgccatggcgacagaggttgccatggcgactcgggttgccatggcgacgacggttgccatggcgacctaggttgccatggcgacactggttgccatggcgactgcggttgccatggcgacgtaggcgcgccatgcttcatcagactct

SEQ ID NO: 813 - DNA, 197 bp, Artificial Sequence; identical to SEQ ID NO: 812
  Synthetic polynucleotide

SEQ ID NO: 814 - DNA, 200 bp, Artificial Sequence
  Synthetic polynucleotide
atcatctcaccttgcctcctgccgaaggttccaagctacctgcaggaggagagaaggggaagggaagaaagggagaagaaggagagaaggggaagggaagaaagggagatcgaggagagaaggggaagggaagaaagggagagacaggagagaaggggaagggaagaaagggagaggcgcgccatgcttcatcagactct

SEQ ID NO: 815 - DNA, 200 bp, Artificial Sequence; identical to SEQ ID NO: 814
  Synthetic polynucleotide

SEQ ID NO: 816 - DNA, 191 bp, Artificial Sequence
  Synthetic polynucleotide
atcatctcaccttgcctcctgggctgggaaattactatcctgcaggcgagttaattaataattagacgagttaattaataatttcgcgagttaattaataattgaccgagttaattaataattctacgagttaattaataattactcgagttaattaataatttgcggcgcgccatgcttcatcagactct

SEQ ID NO: 817 - DNA, 191 bp, Artificial Sequence; identical to SEQ ID NO: 816
  Synthetic polynucleotide

SEQ ID NO: 818 - DNA, 180 bp, Artificial Sequence
  Synthetic polynucleotide
atcatctcaccttgcctcctgtcaatcctcatgcgagacctgcagggcggcgcctgcagagcggcgcctgctcggcggcgcctgcgacgcggcgcctgcctagcggcgcctgcactgcggcgcctgctgcgcggcgcctgcgtagcggcgcctgcggcgcgccatgcttcatcagactct

SEQ ID NO: 819 - DNA, 180 bp, Artificial Sequence; identical to SEQ ID NO: 818
  Synthetic polynucleotide

SEQ ID NO: 820 - DNA, 140 bp, Artificial Sequence
  Synthetic polynucleotide
atcatctcaccttgcctcctgagctaagtggcctgccacctgcaggtttaatagatttaattcgtttaatgactttaatctatttaatacttttaattgctttaatgtatttaatggcgcgccatgcttcatcagactct

SEQ ID NO: 821 - DNA, 140 bp, Artificial Sequence; identical to SEQ ID NO: 820
  Synthetic polynucleotide

SEQ ID NO: 822 - DNA, 185 bp, Artificial Sequence
  Synthetic polynucleotide
atcatctcaccttgcctcctggtatcgtatctcaatcccctgcaggagttattaatgaggtcagaagttattaatgaggtctcgagttattaatgaggtcgacagttattaatgaggtcctaagttattaatgaggtcactagttattaatgaggtctgcggcgcgccatgcttcatcagactct

SEQ ID NO: 823 - DNA, 185 bp, Artificial Sequence; identical to SEQ ID NO: 822
  Synthetic polynucleotide

SEQ ID NO: 824 - DNA, 197 bp, Artificial Sequence
  Synthetic polynucleotide
atcatctcaccttgcctcctgtgagcagcttcaagaaccctgcagggtgccccctggtggcagagtgccccctggtggctcggtgccccctggtggcgacgtgccccctggtggcctagtgccccctggtggcactgtgccccctggtggctgcgtgccccctggtggcgtaggcgcgccatgcttcatcagactct

SEQ ID NO: 825 - DNA, 197 bp, Artificial Sequence; identical to SEQ ID NO: 824
  Synthetic polynucleotide

SEQ ID NO: 826 - DNA, 172 bp, Artificial Sequence
  Synthetic polynucleotide
atcatctcaccttgcctcctgagatcagagtccctaatcctgcaggaatgacgtcaagaaatgacgtcatcgaatgacgtcagacaatgacgtcactaaatgacgtcaactaatgacgtcatgcaatgacgtcagtaaatgacgtcaggcgcgccatgcttcatcagactct

SEQ ID NO: 827 - DNA, 172 bp, Artificial Sequence; identical to SEQ ID NO: 826
  Synthetic polynucleotide

SEQ ID NO: 828 - DNA, 156 bp, Artificial Sequence
  Synthetic polynucleotide
atcatctcaccttgcctcctgtgctcgcaactctactacctgcaggaagttcatagaaagttcattcgaagttcatgacaagttcatctaaagttcatactaagttcattgcaagttcatgtaaagttcatggcgcgccatgcttcatcagactct

SEQ ID NO: 829 - DNA, 156 bp, Artificial Sequence; identical to SEQ ID NO: 828
  Synthetic polynucleotide

SEQ ID NO: 830 - DNA, 188 bp, Artificial Sequence
  Synthetic polynucleotide
atcatctcaccttgcctcctgttctaatggtcataacgcctgcaggaattagcatacaagaaattagcatacatcgaattagcatacagacaattagcatacactaaattagcatacaactaattagcatacatgcaattagcatacagtaaattagcatacaggcgcgccatgcttcatcagactct

SEQ ID NO: 831 - DNA, 188 bp, Artificial Sequence; identical to SEQ ID NO: 830
  Synthetic polynucleotide

SEQ ID NO: 832 - DNA, 197 bp, Artificial Sequence
  Synthetic polynucleotide
atcatctcaccttgcctcctgagaagtaggttcgagggcctgcaggctacgcccacgcactagactacgcccacgcacttcgctacgcccacgcactgacctacgcccacgcactctactacgcccacgcactactctacgcccacgcacttgcctacgcccacgcactgtaggcgcgccatgcttcatcagactct

SEQ ID NO: 833 - DNA, 197 bp, Artificial Sequence; identical to SEQ ID NO: 832
  Synthetic polynucleotide

SEQ ID NO: 834 - DNA, 148 bp, Artificial Sequence
  Synthetic polynucleotide
atcatctcaccttgcctcctggttgatggtccggtcgacctgcaggattaataagaattaatatcgattaatagacattaatactaattaataactattaatatgcattaatagtaattaataggcgcgccatgcttcatcagactct

SEQ ID NO: 835 - DNA, 148 bp, Artificial Sequence; identical to SEQ ID NO: 834
  Synthetic polynucleotide

SEQ ID NO: 836 - DNA, 190 bp, Artificial Sequence
  Synthetic polynucleotide
atcatctcaccttgcctcctgacaccctcagtctcacacctgcaggatgaataattaatgagaatgaataattaatgtcgatgaataattaatggacatgaataattaatgctaatgaataattaatgactatgaataattaatgtgcatgaataattaatggtaggcgcgccatgcttcatcagactct

SEQ ID NO: 837 - DNA, 190 bp, Artificial Sequence; identical to SEQ ID NO: 836
  Synthetic polynucleotide

SEQ ID NO: 838 - DNA, 190 bp, Artificial Sequence
  Synthetic polynucleotide
atcatctcaccttgcctcctgctgacgaacggacaaggcctgcaggtgctgagtcacgttagatgctgagtcacgtttcgtgctgagtcacgttgactgctgagtcacgttctatgctgagtcacgttacttgctgagtcacgtttgctgctgagtcacgttgtaggcgcgccatgcttcatcagactct

SEQ ID NO: 839 - DNA, 190 bp, Artificial Sequence; identical to SEQ ID NO: 838
  Synthetic polynucleotide

SEQ ID NO: 840 - DNA, 191 bp, Artificial Sequence
  Synthetic polynucleotide
atcatctcaccttgcctcctgagtcagcggttagcgttcctgcaggataaattttattgcattagaataaattttattgcatttcgataaattttattgcattgacataaattttattgcattctaataaattttattgcattactataaattttattgcatttgcggcgcgccatgcttcatcagactct

SEQ ID NO: 841 - DNA, 191 bp, Artificial Sequence; identical to SEQ ID NO: 840
  Synthetic polynucleotide

SEQ ID NO: 842 - DNA, 188 bp, Artificial Sequence
  Synthetic polynucleotide
atcatctcaccttgcctcctgatagtcaacgttagcgacctgcaggccttcccgcccaagaccttcccgcccatcgccttcccgcccagacccttcccgcccactaccttcccgcccaactccttcccgcccatgcccttcccgcccagtaccttcccgcccaggcgcgccatgcttcatcagactct

SEQ ID NO: 843 - DNA, 188 bp, Artificial Sequence; identical to SEQ ID NO: 842
  Synthetic polynucleotide

SEQ ID NO: 844 - DNA, 190 bp, Artificial Sequence
  Synthetic polynucleotide
atcatctcaccttgcctcctgccctatttccgtgttgtcctgcaggggttaataattaacagaggttaataattaactcgggttaataattaacgacggttaataattaacctaggttaataattaacactggttaataattaactgcggttaataattaacgtaggcgcgccatgcttcatcagactct

SEQ ID NO: 845 - DNA, 190 bp, Artificial Sequence; identical to SEQ ID NO: 844
  Synthetic polynucleotide

SEQ ID NO: 846 - DNA, 164 bp, Artificial Sequence
  Synthetic polynucleotide
atcatctcaccttgcctcctgtagttggtaggcaacctcctgcaggtaaaacaatagataaaacaattcgtaaaacaatgactaaaacaatctataaaacaatacttaaaacaattgctaaaacaatgtataaaacaatggcgcgccatgcttcatcagactct

SEQ ID NO: 847 - DNA, 164 bp, Artificial Sequence; identical to SEQ ID NO: 846
  Synthetic polynucleotide

SEQ ID NO: 848 - DNA, 188 bp, Artificial Sequence
  Synthetic polynucleotide
atcatctcaccttgcctcctgtattgatcttgcgtggtcctgcaggtagggctgcaaaagatagggctgcaaatcgtagggctgcaaagactagggctgcaaactatagggctgcaaaacttagggctgcaaatgctagggctgcaaagtatagggctgcaaaggcgcgccatgcttcatcagactct

SEQ ID NO: 849 - DNA, 188 bp, Artificial Sequence; identical to SEQ ID NO: 848
  Synthetic polynucleotide

SEQ ID NO: 850 - DNA, 197 bp, Artificial Sequence
  Synthetic polynucleotide
atcatctcaccttgcctcctgcgatatctgaacggtaccctgcaggaatttgattgatgggagaaatttgattgatgggtcgaatttgattgatggggacaatttgattgatgggctaaatttgattgatgggactaatttgattgatgggtgcaatttgattgatggggtaggcgcgccatgcttcatcagactct

SEQ ID NO: 851 - DNA, 197 bp, Artificial Sequence; identical to SEQ ID NO: 850
  Synthetic polynucleotide

SEQ ID NO: 852 - DNA, 191 bp, Artificial Sequence
  Synthetic polynucleotide
atcatctcaccttgcctcctgcgtgtcaaatgtccaaccctgcaggggaagggattaattatcagaggaagggattaattatctcgggaagggattaattatcgacggaagggattaattatcctaggaagggattaattatcactggaagggattaattatctgcggcgcgccatgcttcatcagactct

SEQ ID NO: 853 - DNA, 191 bp, Artificial Sequence; identical to SEQ ID NO: 852
  Synthetic polynucleotide

SEQ ID NO: 854 - DNA, 190 bp, Artificial Sequence
  Synthetic polynucleotide
atcatctcaccttgcctcctgtataccgacctgtaagacctgcaggatattgcacaactcagaatattgcacaactctcgatattgcacaactcgacatattgcacaactcctaatattgcacaactcactatattgcacaactctgcatattgcacaactcgtaggcgcgccatgcttcatcagactct

SEQ ID NO: 855 - DNA, 190 bp, Artificial Sequence; identical to SEQ ID NO: 854
  Synthetic polynucleotide

SEQ ID NO: 856 - DNA, 148 bp, Artificial Sequence
  Synthetic polynucleotide
atcatctcaccttgcctcctggttaacgaatacaggcacctgcaggtttattaagatttattatcgtttattagactttattactatttattaacttttattatgctttattagtatttattaggcgcgccatgcttcatcagactct

SEQ ID NO: 857 - DNA, 148 bp, Artificial Sequence; identical to SEQ ID NO: 856
  Synthetic polynucleotide

SEQ ID NO: 858 - DNA, 188 bp, Artificial Sequence
  Synthetic polynucleotide
atcatctcaccttgcctcctgcagtatggactgacccacctgcaggaggtcaaggtcaagaaggtcaaggtcatcgaggtcaaggtcagacaggtcaaggtcactaaggtcaaggtcaactaggtcaaggtcatgcaggtcaaggtcagtaaggtcaaggtcaggcgcgccatgcttcatcagactct

SEQ ID NO: 859 - DNA, 188 bp, Artificial Sequence; identical to SEQ ID NO: 858
  Synthetic polynucleotide

SEQ ID NO: 860 - DNA, 190 bp, Artificial Sequence
  Synthetic polynucleotide
atcatctcaccttgcctcctggtttctagcaggctggacctgcaggccagcagggggcggagaccagcagggggcggtcgccagcagggggcgggacccagcagggggcggctaccagcagggggcggactccagcagggggcggtgcccagcagggggcgggtaggcgcgccatgcttcatcagactct

SEQ ID NO: 861 - DNA, 190 bp, Artificial Sequence; identical to SEQ ID NO: 860
  Synthetic polynucleotide

SEQ ID NO: 862 - DNA, 188 bp, Artificial Sequence
  Synthetic polynucleotide
atcatctcaccttgcctcctgaacgctgcttctgtagacctgcaggtgacctagttttagatgacctagtttttcgtgacctagttttgactgacctagttttctatgacctagttttacttgacctagtttttgctgacctagttttgtatgacctagttttggcgcgccatgcttcatcagactct

SEQ ID NO: 863 - DNA, 188 bp, Artificial Sequence; identical to SEQ ID NO: 862
  Synthetic polynucleotide

SEQ ID NO: 864 - DNA, 172 bp, Artificial Sequence
  Synthetic polynucleotide
atcatctcaccttgcctcctgtgtatcagtccaatccccctgcaggacttcctcttagaacttcctctttcgacttcctcttgacacttcctcttctaacttcctcttactacttcctctttgcacttcctcttgtaacttcctcttggcgcgccatgcttcatcagactct

SEQ ID NO: 865 - DNA, 172 bp, Artificial Sequence; identical to SEQ ID NO: 864
  Synthetic polynucleotide

SEQ ID NO: 866 - DNA, 197 bp, Artificial Sequence
  Synthetic polynucleotide
atcatctcaccttgcctcctggccgtcaaaggaagcaacctgcagggggcaggggtctcggagagggcaggggtctcggtcggggcaggggtctcgggacgggcaggggtctcggctagggcaggggtctcggactgggcaggggtctcggtgcgggcaggggtctcgggtaggcgcgccatgcttcatcagactct

SEQ ID NO: 867 - DNA, 197 bp, Artificial Sequence; identical to SEQ ID NO: 866
  Synthetic polynucleotide

SEQ ID NO: 868 - DNA, 197 bp, Artificial Sequence
  Synthetic polynucleotide
atcatctcaccttgcctcctgcccaataataaacgacgcctgcaggaattcataattatacacaagaaattcataattatacacatcgaattcataattatacacagacaattcataattatacacactaaattcataattatacacaactaattcataattatacacatgcggcgcgccatgcttcatcagactct

SEQ ID NO: 869 - DNA, 197 bp, Artificial Sequence; identical to SEQ ID NO: 868
  Synthetic polynucleotide

SEQ ID NO: 870 - DNA, 148 bp, Artificial Sequence
  Synthetic polynucleotide
atcatctcaccttgcctcctgaatgtcaatagggtctacctgcaggtttattgagatttattgtcgtttattggactttattgctatttattgacttttattgtgctttattggtatttattgggcgcgccatgcttcatcagactct

SEQ ID NO: 871 - DNA, 148 bp, Artificial Sequence; identical to SEQ ID NO: 870
  Synthetic polynucleotide

SEQ ID NO: 872 - DNA, 148 bp, Artificial Sequence
  Synthetic polynucleotide
atcatctcaccttgcctcctgttagagatagcctgcggcctgcaggcccactgagacccactgtcgcccactggaccccactgctacccactgactcccactgtgccccactggtacccactgggcgcgccatgcttcatcagactct

SEQ ID NO: 873 - DNA, 148 bp, Artificial Sequence; identical to SEQ ID NO: 872
  Synthetic polynucleotide

SEQ ID NO: 874 - DNA, 197 bp, Artificial Sequence
  Synthetic polynucleotide
atcatctcaccttgcctcctgtaacctttggcaaccggcctgcaggggggggggggggggaagaggggggggggggggatcgggggggggggggggagacggggggggggggggactaggggggggggggggaactggggggggggggggatgcggggggggggggggagtaggcgcgccatgcttcatcagactct

SEQ ID NO: 875 - DNA, 197 bp, Artificial Sequence; identical to SEQ ID NO: 874
  Synthetic polynucleotide

SEQ ID NO: 876 - DNA, 191 bp, Artificial Sequence
  Synthetic polynucleotide
atcatctcaccttgcctcctgtagctgccgcttgctaacctgcaggctcagctaattagtttaagactcagctaattagtttatcgctcagctaattagtttagacctcagctaattagtttactactcagctaattagtttaactctcagctaattagtttatgcggcgcgccatgcttcatcagactct

SEQ ID NO: 877 - DNA, 191 bp, Artificial Sequence; identical to SEQ ID NO: 876
  Synthetic polynucleotide

SEQ ID NO: 878 - DNA, 186 bp, Artificial Sequence
  Synthetic polynucleotide
atcatctcaccttgcctcctggattgactccgcccttgcctgcaggggacatgcccgggcatgtccagaggacatgcccgggcatgtcctcgggacatgcccgggcatgtccgacggacatgcccgggcatgtccctaggacatgcccgggcatgtccactggcgcgccatgcttcatcagactct

SEQ ID NO: 879 - DNA, 186 bp, Artificial Sequence; identical to SEQ ID NO: 878
  Synthetic polynucleotide

SEQ ID NO: 880 - DNA, 172 bp, Artificial Sequence
  Synthetic polynucleotide
atcatctcaccttgcctcctgaaggataggattagacccctgcaggggtcataaaaagaggtcataaaatcgggtcataaaagacggtcataaaactaggtcataaaaactggtcataaaatgcggtcataaaagtaggtcataaaaggcgcgccatgcttcatcagactct

SEQ ID NO: 881 - DNA, 172 bp, Artificial Sequence; identical to SEQ ID NO: 880
  Synthetic polynucleotide

SEQ ID NO: 882 - DNA, 172 bp, Artificial Sequence
  Synthetic polynucleotide
atcatctcaccttgcctcctggttaatcctagaagtggcctgcaggggggattagcagaggggattagctcgggggattagcgacggggattagcctaggggattagcactggggattagctgcggggattagcgtaggggattagcggcgcgccatgcttcatcagactct

SEQ ID NO: 883 - DNA, 172 bp, Artificial Sequence; identical to SEQ ID NO: 882
  Synthetic polynucleotide

SEQ ID NO: 884 - DNA, 188 bp, Artificial Sequence
  Synthetic polynucleotide
atcatctcaccttgcctcctgtatttcaaagtcctgcgcctgcagggggttcgagggtagagggttcgagggttcggggttcgagggtgacgggttcgagggtctagggttcgagggtactgggttcgagggttgcgggttcgagggtgtagggttcgagggtggcgcgccatgcttcatcagactct

SEQ ID NO: 885 - DNA, 188 bp, Artificial Sequence; identical to SEQ ID NO: 884
  Synthetic polynucleotide

SEQ ID NO: 886 - DNA, 172 bp, Artificial Sequence
  Synthetic polynucleotide
atcatctcaccttgcctcctggcaacctagacctgtggcctgcaggagttttattgagaagttttattgtcgagttttattggacagttttattgctaagttttattgactagttttattgtgcagttttattggtaagttttattgggcgcgccatgcttcatcagactct

SEQ ID NO: 887 - DNA, 172 bp, Artificial Sequence; identical to SEQ ID NO: 886
  Synthetic polynucleotide

SEQ ID NO: 888 - DNA, 156 bp, Artificial Sequence
  Synthetic polynucleotide
atcatctcaccttgcctcctgtccatatagttagccttcctgcagggggtatcaagagggtatcatcggggtatcagacgggtatcactagggtatcaactgggtatcatgcgggtatcagtagggtatcaggcgcgccatgcttcatcagactct

SEQ ID NO: 889 - DNA, 156 bp, Artificial Sequence; identical to SEQ ID NO: 888
  Synthetic polynucleotide

SEQ ID NO: 890 - DNA, 140 bp, Artificial Sequence
  Synthetic polynucleotide
atcatctcaccttgcctcctgcgacgtcttattgagcacctgcaggtgccaaagatgccaatcgtgccaagactgccaactatgccaaacttgccaatgctgccaagtatgccaaggcgcgccatgcttcatcagactct

SEQ ID NO: 891 - DNA, 140 bp, Artificial Sequence; identical to SEQ ID NO: 890
  Synthetic polynucleotide

SEQ ID NO: 892 - DNA, 188 bp, Artificial Sequence
  Synthetic polynucleotide
atcatctcaccttgcctcctgcgtacgaataaagtgtacctgcaggcgttacataacgagacgttacataacgtcgcgttacataacggaccgttacataacgctacgttacataacgactcgttacataacgtgccgttacataacggtacgttacataacgggcgcgccatgcttcatcagactct

SEQ ID NO: 893 - DNA, 188 bp, Artificial Sequence; identical to SEQ ID NO: 892
  Synthetic polynucleotide

SEQ ID NO: 894 - DNA, 186 bp, Artificial Sequence
  Synthetic polynucleotide
atcatctcaccttgcctcctgtgtcggctcgtctgatccctgcaggggacatgcccgggcatgtctagaggacatgcccgggcatgtcttcgggacatgcccgggcatgtctgacggacatgcccgggcatgtctctaggacatgcccgggcatgtctactggcgcgccatgcttcatcagactct

SEQ ID NO: 895 - DNA, 186 bp, Artificial Sequence; identical to SEQ ID NO: 894
  Synthetic polynucleotide

SEQ ID NO: 896 - DNA, 148 bp, Artificial Sequence
  Synthetic polynucleotide
atcatctcaccttgcctcctgtgctgacctcagtctcgcctgcaggtaatggcagataatggctcgtaatggcgactaatggcctataatggcacttaatggctgctaatggcgtataatggcggcgcgccatgcttcatcagactct

SEQ ID NO: 897 - DNA, 148 bp, Artificial Sequence; identical to SEQ ID NO: 896
  Synthetic polynucleotide

SEQ ID NO: 898 - DNA, 196 bp, Artificial Sequence
  Synthetic polynucleotide
atcatctcaccttgcctcctgacgttggccgtgcaactcctgcaggacaacctccctggggagttgtgagaacaacctccctggggagttgtgtcgacaacctccctggggagttgtggacacaacctccctggggagttgtgctaacaacctccctggggagttgtgactggcgcgccatgcttcatcagactct

SEQ ID NO: 899 - DNA, 196 bp, Artificial Sequence; identical to SEQ ID NO: 898
  Synthetic polynucleotide

SEQ ID NO: 900 - DNA, 197 bp, Artificial Sequence
  Synthetic polynucleotide
atcatctcaccttgcctcctgcaagtctgcctagaagtcctgcaggcaacaatcttcattgtccagacaacaatcttcattgtcctcgcaacaatcttcattgtccgaccaacaatcttcattgtccctacaacaatcttcattgtccactcaacaatcttcattgtcctgcggcgcgccatgcttcatcagactct

SEQ ID NO: 901 - DNA, 197 bp, Artificial Sequence; identical to SEQ ID NO: 900
  Synthetic polynucleotide

SEQ ID NO: 902 - DNA, 156 bp, Artificial Sequence
  Synthetic polynucleotide
atcatctcaccttgcctcctgacctgttgctcgattcccctgcaggcttaagtgagacttaagtgtcgcttaagtggaccttaagtgctacttaagtgactcttaagtgtgccttaagtggtacttaagtgggcgcgccatgcttcatcagactct

SEQ ID NO: 903 - DNA, 156 bp, Artificial Sequence; identical to SEQ ID NO: 902
  Synthetic polynucleotide

SEQ ID NO: 904 - DNA, 197 bp, Artificial Sequence
  Synthetic polynucleotide
atcatctcaccttgcctcctgagggacacatctctgcgcctgcagggttaatcggattaacagagttaatcggattaactcggttaatcggattaacgacgttaatcggattaacctagttaatcggattaacactgttaatcggattaactgcgttaatcggattaacgtaggcgcgccatgcttcatcagactct

SEQ ID NO: 905 - DNA, 197 bp, Artificial Sequence; identical to SEQ ID NO: 904
  Synthetic polynucleotide

SEQ ID NO: 906 - DNA, 191 bp, Artificial Sequence
  Synthetic polynucleotide
atcatctcaccttgcctcctgcgaacagtcatcgaactcctgcaggcacgtggttagcacgtgagacacgtggttagcacgtgtcgcacgtggttagcacgtggaccacgtggttagcacgtgctacacgtggttagcacgtgactcacgtggttagcacgtgtgcggcgcgccatgcttcatcagactct

SEQ ID NO: 907 - DNA, 191 bp, Artificial Sequence; identical to SEQ ID NO: 906
  Synthetic polynucleotide

SEQ ID NO: 908 - DNA, 148 bp, Artificial Sequence
  Synthetic polynucleotide
atcatctcaccttgcctcctgccctaacgcttgtgtgtcctgcaggctttgatagactttgattcgctttgatgacctttgatctactttgatactctttgattgcctttgatgtactttgatggcgcgccatgcttcatcagactct

SEQ ID NO: 909 - DNA, 148 bp, Artificial Sequence; identical to SEQ ID NO: 908
  Synthetic polynucleotide

SEQ ID NO: 910 - DNA, 172 bp, Artificial Sequence
  Synthetic polynucleotide
atcatctcaccttgcctcctgaagtagccatttgattgcctgcaggcgaacattctagacgaacattcttcgcgaacattctgaccgaacattctctacgaacattctactcgaacattcttgccgaacattctgtacgaacattctggcgcgccatgcttcatcagactct

SEQ ID NO: 911 - DNA, 172 bp, Artificial Sequence; identical to SEQ ID NO: 910
  Synthetic polynucleotide

SEQ ID NO: 912 - DNA, 172 bp, Artificial Sequence
  Synthetic polynucleotide
atcatctcaccttgcctcctgtggataacttagggcagcctgcaggagcggaagtgagaagcggaagtgtcgagcggaagtggacagcggaagtgctaagcggaagtgactagcggaagtgtgcagcggaagtggtaagcggaagtgggcgcgccatgcttcatcagactct

SEQ ID NO: 913 - DNA, 172 bp, Artificial Sequence; identical to SEQ ID NO: 912
  Synthetic polynucleotide

SEQ ID NO: 914 - DNA, 188 bp, Artificial Sequence
  Synthetic polynucleotide
atcatctcaccttgcctcctgcaatagatttagtccgacctgcagggaaacatctggaagagaaacatctggatcggaaacatctggagacgaaacatctggactagaaacatctggaactgaaacatctggatgcgaaacatctggagtagaaacatctggaggcgcgccatgcttcatcagactct

SEQ ID NO: 915 - DNA, 188 bp, Artificial Sequence; identical to SEQ ID NO: 914
  Synthetic polynucleotide

SEQ ID NO: 916 - DNA, 172 bp, Artificial Sequence
  Synthetic polynucleotide
atcatctcaccttgcctcctgactatgaagctggaccccctgcaggtaaaacaaaaagataaaacaaaatcgtaaaacaaaagactaaaacaaaactataaaacaaaaacttaaaacaaaatgctaaaacaaaagtataaaacaaaaggcgcgccatgcttcatcagactct

SEQ ID NO: 917 - DNA, 172 bp, Artificial Sequence; identical to SEQ ID NO: 916
  Synthetic polynucleotide

SEQ ID NO: 918 - DNA, 188 bp, Artificial Sequence
  Synthetic polynucleotide
atcatctcaccttgcctcctgagacaacagcgtgcgaccctgcaggcctaagtaaacaagacctaagtaaacatcgcctaagtaaacagaccctaagtaaacactacctaagtaaacaactcctaagtaaacatgccctaagtaaacagtacctaagtaaacaggcgcgccatgcttcatcagactct

SEQ ID NO: 919 - DNA, 188 bp, Artificial Sequence; identical to SEQ ID NO: 918
  Synthetic polynucleotide

SEQ ID NO: 920 - DNA, 191 bp, Artificial Sequence
  Synthetic polynucleotide
atcatctcaccttgcctcctgcagtttagtatgttgggcctgcaggaaggtcattcaaggtcaagaaaggtcattcaaggtcatcgaaggtcattcaaggtcagacaaggtcattcaaggtcactaaaggtcattcaaggtcaactaaggtcattcaaggtcatgcggcgcgccatgcttcatcagactct

SEQ ID NO: 921 - DNA, 191 bp, Artificial Sequence; identical to SEQ ID NO: 920
  Synthetic polynucleotide

SEQ ID NO: 922 - DNA, 164 bp, Artificial Sequence
  Synthetic polynucleotide
atcatctcaccttgcctcctgtttcttgccttgaagatcctgcaggcagggggtgagacagggggtgtcgcagggggtggaccagggggtgctacagggggtgactcagggggtgtgccagggggtggtacagggggtgggcgcgccatgcttcatcagactct

SEQ ID NO: 923 - DNA, 164 bp, Artificial Sequence; identical to SEQ ID NO: 922
  Synthetic polynucleotide

SEQ ID NO: 924 - DNA, 185 bp, Artificial Sequence
  Synthetic polynucleotide
atcatctcaccttgcctcctgaaatgaccgacctcacacctgcaggatgcgggtacccgcatagaatgcgggtacccgcattcgatgcgggtacccgcatgacatgcgggtacccgcatctaatgcgggtacccgcatactatgcgggtacccgcattgcggcgcgccatgcttcatcagactct

SEQ ID NO: 925 - DNA, 185 bp, Artificial Sequence; identical to SEQ ID NO: 924
  Synthetic polynucleotide

SEQ ID NO: 926 - DNA, 197 bp, Artificial Sequence
  Synthetic polynucleotide
atcatctcaccttgcctcctgagggatggcgggtaacacctgcaggtccatatatgggcatagatccatatatgggcattcgtccatatatgggcatgactccatatatgggcatctatccatatatgggcatacttccatatatgggcattgctccatatatgggcatgtaggcgcgccatgcttcatcagactct

SEQ ID NO: 927 - DNA, 197 bp, Artificial Sequence; identical to SEQ ID NO: 926
  Synthetic polynucleotide

SEQ ID NO: 928 - DNA, 190 bp, Artificial Sequence
  Synthetic polynucleotide
atcatctcaccttgcctcctggaggcgttcgtgcaaaccctgcagggctgtgcgaggtgcagagctgtgcgaggtgctcggctgtgcgaggtgcgacgctgtgcgaggtgcctagctgtgcgaggtgcactgctgtgcgaggtgctgcgctgtgcgaggtgcgtaggcgcgccatgcttcatcagactct

SEQ ID NO: 929 - DNA, 190 bp, Artificial Sequence; identical to SEQ ID NO: 928
  Synthetic polynucleotide

SEQ ID NO: 930 - DNA, 172 bp, Artificial Sequence
  Synthetic polynucleotide
atcatctcaccttgcctcctgatactcttatggcgcctcctgcaggagctgtcaaaagaagctgtcaaatcgagctgtcaaagacagctgtcaaactaagctgtcaaaactagctgtcaaatgcagctgtcaaagtaagctgtcaaaggcgcgccatgcttcatcagactct

SEQ ID NO: 931 - DNA, 172 bp, Artificial Sequence; identical to SEQ ID NO: 930
  Synthetic polynucleotide

SEQ ID NO: 932 - DNA, 197 bp, Artificial Sequence
  Synthetic polynucleotide
atcatctcaccttgcctcctgcggagaaagggtgatttcctgcaggtgtgcattgccaaataccagatgtgcattgccaaatacctcgtgtgcattgccaaataccgactgtgcattgccaaataccctatgtgcattgccaaataccacttgtgcattgccaaatacctgcggcgcgccatgcttcatcagactct

SEQ ID NO: 933 - DNA, 197 bp, Artificial Sequence; identical to SEQ ID NO: 932
  Synthetic polynucleotide

SEQ ID NO: 934 - DNA, 172 bp, Artificial Sequence
  Synthetic polynucleotide
atcatctcaccttgcctcctggcttagcttacatagaccctgcaggataatgagctagaataatgagcttcgataatgagctgacataatgagctctaataatgagctactataatgagcttgcataatgagctgtaataatgagctggcgcgccatgcttcatcagactct

SEQ ID NO: 935 - DNA, 172 bp, Artificial Sequence; identical to SEQ ID NO: 934
  Synthetic polynucleotide

SEQ ID NO: 936 - DNA, 196 bp, Artificial Sequence
  Synthetic polynucleotide
atcatctcaccttgcctcctgaggagcagttcgaggagcctgcaggccccctcacctgcagaccccctcacctgctcgccccctcacctgcgacccccctcacctgcctaccccctcacctgcactccccctcacctgctgcccccctcacctgcgtaccccctcacctgcggcgcgccatgcttcatcagactct

SEQ ID NO: 937 - DNA, 196 bp, Artificial Sequence; identical to SEQ ID NO: 936
  Synthetic polynucleotide

SEQ ID NO: 938 - DNA, 180 bp, Artificial Sequence
  Synthetic polynucleotide
atcatctcaccttgcctcctgccgtccgccagagtttacctgcagggacagctgttcagagacagctgttctcggacagctgttcgacgacagctgttcctagacagctgttcactgacagctgttctgcgacagctgttcgtagacagctgttcggcgcgccatgcttcatcagactct

SEQ ID NO: 939 - DNA, 180 bp, Artificial Sequence; identical to SEQ ID NO: 938
  Synthetic polynucleotide

SEQ ID NO: 940 - DNA, 196 bp, Artificial Sequence
  Synthetic polynucleotide
atcatctcaccttgcctcctggatcggatatcgtcccacctgcaggtgtttggtaagttagatgtttggtaagtttcgtgtttggtaagttgactgtttggtaagttctatgtttggtaagttacttgtttggtaagtttgctgtttggtaagttgtatgtttggtaagttggcgcgccatgcttcatcagactct

SEQ ID NO: 941 - DNA, 196 bp, Artificial Sequence; identical to SEQ ID NO: 940
  Synthetic polynucleotide

SEQ ID NO: 942 - DNA, 191 bp, Artificial Sequence
  Synthetic polynucleotide
atcatctcaccttgcctcctgccacgcaagatcagatccctgcaggtcgctataattaccgacagatcgctataattaccgactcgtcgctataattaccgacgactcgctataattaccgacctatcgctataattaccgacacttcgctataattaccgactgcggcgcgccatgcttcatcagactct

SEQ ID NO: 943 - DNA, 191 bp, Artificial Sequence; identical to SEQ ID NO: 942
  Synthetic polynucleotide

SEQ ID NO: 944 - DNA, 197 bp, Artificial Sequence
  Synthetic polynucleotide
atcatctcaccttgcctcctgtgaactagtgacagtagcctgcaggaaaaatggcgccatttttagaaaaaatggcgccattttttcgaaaaatggcgccatttttgacaaaaatggcgccatttttctaaaaaatggcgccatttttactaaaaatggcgccattttttgcggcgcgccatgcttcatcagactct

SEQ ID NO: 945 - DNA, 197 bp, Artificial Sequence; identical to SEQ ID NO: 944
  Synthetic polynucleotide

SEQ ID NO: 946 - DNA, 164 bp, Artificial Sequence
  Synthetic polynucleotide
atcatctcaccttgcctcctgtgcaggatacaaagaagcctgcagggtgacctctagagtgacctcttcggtgacctctgacgtgacctctctagtgacctctactgtgacctcttgcgtgacctctgtagtgacctctggcgcgccatgcttcatcagactct

SEQ ID NO: 947 - DNA, 164 bp, Artificial Sequence; identical to SEQ ID NO: 946
  Synthetic polynucleotide

SEQ ID NO: 948 - DNA, 188 bp, Artificial Sequence
  Synthetic polynucleotide
atcatctcaccttgcctcctgcctgactatataagagccctgcaggggctcttgagggagaggctcttgagggtcgggctcttgaggggacggctcttgagggctaggctcttgagggactggctcttgagggtgcggctcttgaggggtaggctcttgagggggcgcgccatgcttcatcagactct

SEQ ID NO: 949 - DNA, 188 bp, Artificial Sequence; identical to SEQ ID NO: 948
  Synthetic polynucleotide

SEQ ID NO: 950 - DNA, 185 bp, Artificial Sequence
  Synthetic polynucleotide
atcatctcaccttgcctcctgatctcttatcgggtaatcctgcagggtattgacagctagttagagtattgacagctagtttcggtattgacagctagttgacgtattgacagctagttctagtattgacagctagttactgtattgacagctagtttgcggcgcgccatgcttcatcagactct

SEQ ID NO: 951 - DNA, 185 bp, Artificial Sequence; identical to SEQ ID NO: 950
  Synthetic polynucleotide

SEQ ID NO: 952 - DNA, 190 bp, Artificial Sequence
  Synthetic polynucleotide
atcatctcaccttgcctcctgaccgagaacgagactaacctgcaggggttaataattaccagaggttaataattacctcgggttaataattaccgacggttaataattaccctaggttaataattaccactggttaataattacctgcggttaataattaccgtaggcgcgccatgcttcatcagactct

SEQ ID NO: 953 - DNA, 190 bp, Artificial Sequence; identical to SEQ ID NO: 952
  Synthetic polynucleotide

SEQ ID NO: 954 - DNA, 172 bp, Artificial Sequence
  Synthetic polynucleotide
atcatctcaccttgcctcctggctgatccattcgtaggcctgcaggagctgtcaatagaagctgtcaattcgagctgtcaatgacagctgtcaatctaagctgtcaatactagctgtcaattgcagctgtcaatgtaagctgtcaatggcgcgccatgcttcatcagactct

SEQ ID NO: 955 - DNA, 172 bp, Artificial Sequence; identical to SEQ ID NO: 954
  Synthetic polynucleotide

SEQ ID NO: 956 - DNA, 180 bp, Artificial Sequence
  Synthetic polynucleotide
atcatctcaccttgcctcctgatccaccttacgcagcccctgcagggccccgcccccagagccccgccccctcggccccgcccccgacgccccgcccccctagccccgcccccactgccccgccccctgcgccccgcccccgtagccccgcccccggcgcgccatgcttcatcagactct

SEQ ID NO: 957 - DNA, 180 bp, Artificial Sequence; identical to SEQ ID NO: 956
  Synthetic polynucleotide

SEQ ID NO: 958 - DNA, 180 bp, Artificial Sequence
  Synthetic polynucleotide
atcatctcaccttgcctcctgagccgttcttagtcagccctgcagggatgactcagtagagatgactcagttcggatgactcagtgacgatgactcagtctagatgactcagtactgatgactcagttgcgatgactcagtgtagatgactcagtggcgcgccatgcttcatcagactct

SEQ ID NO: 959 - DNA, 180 bp, Artificial Sequence; identical to SEQ ID NO: 958
  Synthetic polynucleotide

SEQ ID NO: 960 - DNA, 172 bp, Artificial Sequence
  Synthetic polynucleotide
atcatctcaccttgcctcctggaggtattgatgatcatcctgcaggtcccttgggtagatcccttgggttcgtcccttgggtgactcccttgggtctatcccttgggtacttcccttgggttgctcccttgggtgtatcccttgggtggcgcgccatgcttcatcagactct

SEQ ID NO: 961 - DNA, 172 bp, Artificial Sequence; identical to SEQ ID NO: 960
  Synthetic polynucleotide

SEQ ID NO: 962 - DNA, 197 bp, Artificial Sequence
  Synthetic polynucleotide
atcatctcaccttgcctcctgtatcgctcattgcggttcctgcagggagcagtcaagcgtgacgagagagcagtcaagcgtgacgtcggagcagtcaagcgtgacggacgagcagtcaagcgtgacgctagagcagtcaagcgtgacgactgagcagtcaagcgtgacgtgcggcgcgccatgcttcatcagactct

SEQ ID NO: 963 - DNA, 197 bp, Artificial Sequence; identical to SEQ ID NO: 962
  Synthetic polynucleotide

SEQ ID NO: 964 - DNA, 191 bp, Artificial Sequence
  Synthetic polynucleotide
atcatctcaccttgcctcctgacagaacatcgactaaacctgcaggagcgccacctagtggtaagaagcgccacctagtggtatcgagcgccacctagtggtagacagcgccacctagtggtactaagcgccacctagtggtaactagcgccacctagtggtatgcggcgcgccatgcttcatcagactct

SEQ ID NO: 965 - DNA, 191 bp, Artificial Sequence; identical to SEQ ID NO: 964
  Synthetic polynucleotide

SEQ ID NO: 966 - DNA, 172 bp, Artificial Sequence
  Synthetic polynucleotide
atcatctcaccttgcctcctgagctcgtaaccctgatccctgcagggttgccatggagagttgccatggtcggttgccatgggacgttgccatggctagttgccatggactgttgccatggtgcgttgccatgggtagttgccatggggcgcgccatgcttcatcagactct

SEQ ID NO: 967 - DNA, 172 bp, Artificial Sequence; identical to SEQ ID NO: 966
  Synthetic polynucleotide

SEQ ID NO: 968 - DNA, 172 bp, Artificial Sequence
  Synthetic polynucleotide
atcatctcaccttgcctcctgcgcattacgggtgcatgcctgcaggtgctgagtcaagatgctgagtcatcgtgctgagtcagactgctgagtcactatgctgagtcaacttgctgagtcatgctgctgagtcagtatgctgagtcaggcgcgccatgcttcatcagactct

SEQ ID NO: 969 - DNA, 172 bp, Artificial Sequence; identical to SEQ ID NO: 968
  Synthetic polynucleotide

SEQ ID NO: 970 - DNA, 172 bp, Artificial Sequence
  Synthetic polynucleotide
atcatctcaccttgcctcctgtgaagtgctatacggtgcctgcaggaaacgaaactagaaaacgaaacttcgaaacgaaactgacaaacgaaactctaaaacgaaactactaaacgaaacttgcaaacgaaactgtaaaacgaaactggcgcgccatgcttcatcagactct

SEQ ID NO: 971 - DNA, 172 bp, Artificial Sequence; identical to SEQ ID NO: 970
  Synthetic polynucleotide

SEQ ID NO: 972 - DNA, 172 bp, Artificial Sequence
  Synthetic polynucleotide
atcatctcaccttgcctcctgacttcggtgtctgtaatcctgcagggtttggcgcgagagtttggcgcgtcggtttggcgcggacgtttggcgcgctagtttggcgcgactgtttggcgcgtgcgtttggcgcggtagtttggcgcgggcgcgccatgcttcatcagactct

SEQ ID NO: 973 - DNA, 172 bp, Artificial Sequence; identical to SEQ ID NO: 972
  Synthetic polynucleotide

SEQ ID NO: 974 - DNA, 156 bp, Artificial Sequence
  Synthetic polynucleotide
atcatctcaccttgcctcctgtgtgtgggacgtaccaacctgcaggcaatatcgagacaatatcgtcgcaatatcggaccaatatcgctacaatatcgactcaatatcgtgccaatatcggtacaatatcgggcgcgccatgcttcatcagactct

SEQ ID NO: 975 - DNA, 156 bp, Artificial Sequence; identical to SEQ ID NO: 974
  Synthetic polynucleotide

SEQ ID NO: 976 - DNA, 191 bp, Artificial Sequence
  Synthetic polynucleotide
atcatctcaccttgcctcctgaagatgactaccagctgcctgcaggcgctaatcggaaaacgattagagacgctaatcggaaaacgattagtcgcgctaatcggaaaacgattaggaccgctaatcggaaaacgattagctacgctaatcggaaaacgattagactggcgcgccatgcttcatcagactct

SEQ ID NO: 977 - DNA, 191 bp, Artificial Sequence; identical to SEQ ID NO: 976
  Synthetic polynucleotide

SEQ ID NO: 978 - DNA, 185 bp, Artificial Sequence
  Synthetic polynucleotide
atcatctcaccttgcctcctgcgggaggaggtaatccacctgcaggaggcaacttccctctaagaaggcaacttccctctatcgaggcaacttccctctagacaggcaacttccctctactaaggcaacttccctctaactaggcaacttccctctatgcggcgcgccatgcttcatcagactct

SEQ ID NO: 979 - DNA, 185 bp, Artificial Sequence; identical to SEQ ID NO: 978
  Synthetic polynucleotide

SEQ ID NO: 980 - DNA, 156 bp, Artificial Sequence
  Synthetic polynucleotide
atcatctcaccttgcctcctggtccacagggatacagtcctgcagggctactggagagctactggtcggctactgggacgctactggctagctactggactgctactggtgcgctactgggtagctactggggcgcgccatgcttcatcagactct

SEQ ID NO: 981 - DNA, 156 bp, Artificial Sequence; identical to SEQ ID NO: 980
  Synthetic polynucleotide

SEQ ID NO: 982 - DNA, 180 bp, Artificial Sequence
  Synthetic polynucleotide
atcatctcaccttgcctcctggagcaactctgagtgctcctgcaggatcagctggtcagaatcagctggtctcgatcagctggtcgacatcagctggtcctaatcagctggtcactatcagctggtctgcatcagctggtcgtaatcagctggtcggcgcgccatgcttcatcagactct

SEQ ID NO: 983 - DNA, 180 bp, Artificial Sequence; identical to SEQ ID NO: 982
  Synthetic polynucleotide

SEQ ID NO: 984 - DNA, 188 bp, Artificial Sequence
  Synthetic polynucleotide
atcatctcaccttgcctcctgacctgaggcaaacgtaccctgcaggtgtttacttaggagatgtttacttaggtcgtgtttacttagggactgtttacttaggctatgtttacttaggacttgtttacttaggtgctgtttacttagggtatgtttacttaggggcgcgccatgcttcatcagactct

SEQ ID NO: 985 - DNA, 188 bp, Artificial Sequence; identical to SEQ ID NO: 984
  Synthetic polynucleotide

SEQ ID NO: 986 - DNA, 188 bp, Artificial Sequence
  Synthetic polynucleotide
atcatctcaccttgcctcctgtgaccttgggagggtaacctgcaggggtcattaattcagaggtcattaattctcgggtcattaattcgacggtcattaattcctaggtcattaattcactggtcattaattctgcggtcattaattcgtaggtcattaattcggcgcgccatgcttcatcagactct

SEQ ID NO: 987 - DNA, 188 bp, Artificial Sequence; identical to SEQ ID NO: 986
  Synthetic polynucleotide

SEQ ID NO: 988 - DNA, 196 bp, Artificial Sequence
  Synthetic polynucleotide
atcatctcaccttgcctcctgagtgactgtctacacttcctgcagggcagcagctgtcaagagcagcagctgtcatcggcagcagctgtcagacgcagcagctgtcactagcagcagctgtcaactgcagcagctgtcatgcgcagcagctgtcagtagcagcagctgtcaggcgcgccatgcttcatcagactct

SEQ ID NO: 989 - DNA, 196 bp, Artificial Sequence; identical to SEQ ID NO: 988
  Synthetic polynucleotide

SEQ ID NO: 990 - DNA, 191 bp, Artificial Sequence
  Synthetic polynucleotide
atcatctcaccttgcctcctgatcgcatccgcgattgacctgcaggtatagatcaaaggaaatagatatagatcaaaggaaattcgtatagatcaaaggaaatgactatagatcaaaggaaatctatatagatcaaaggaaatacttatagatcaaaggaaattgcggcgcgccatgcttcatcagactct

SEQ ID NO: 991 - DNA, 191 bp, Artificial Sequence; identical to SEQ ID NO: 990
  Synthetic polynucleotide

SEQ ID NO: 992 - DNA, 191 bp, Artificial Sequence
  Synthetic polynucleotide
atcatctcaccttgcctcctgactcgttcggtcggtaacctgcaggagtgacaggcccgccggccaaagaagtgacaggcccgccggccaatcgagtgacaggcccgccggccaagacagtgacaggcccgccggccaactaagtgacaggcccgccggccaaactggcgcgccatgcttcatcagactct

SEQ ID NO: 993 - DNA, 191 bp, Artificial Sequence; identical to SEQ ID NO: 992
  Synthetic polynucleotide

SEQ ID NO: 994 - DNA, 164 bp, Artificial Sequence
  Synthetic polynucleotide
atcatctcaccttgcctcctgggagccaagggttaggacctgcaggattgtttacagaattgtttactcgattgtttacgacattgtttacctaattgtttacactattgtttactgcattgtttacgtaattgtttacggcgcgccatgcttcatcagactct

SEQ ID NO: 995 - DNA, 164 bp, Artificial Sequence; identical to SEQ ID NO: 994
  Synthetic polynucleotide

SEQ ID NO: 996 - DNA, 164 bp, Artificial Sequence
  Synthetic polynucleotide
atcatctcaccttgcctcctggtcctcagaatcagagccctgcaggtttggcgcgagatttggcgcgtcgtttggcgcggactttggcgcgctatttggcgcgacttttggcgcgtgctttggcgcggtatttggcgcgggcgcgccatgcttcatcagactct

SEQ ID NO: 997 - DNA, 164 bp, Artificial Sequence; identical to SEQ ID NO: 996
  Synthetic polynucleotide

SEQ ID NO: 998 - DNA, 164 bp, Artificial Sequence
  Synthetic polynucleotide
atcatctcaccttgcctcctgatacccattgctcggaccctgcaggcctccctctagacctccctcttcgcctccctctgaccctccctctctacctccctctactcctccctcttgccctccctctgtacctccctctggcgcgccatgcttcatcagactct

SEQ ID NO: 999 - DNA, 164 bp, Artificial Sequence; identical to SEQ ID NO: 998
  Synthetic polynucleotide

SEQ ID NO: 1000 - DNA, 156 bp, Artificial Sequence
  Synthetic polynucleotide
atcatctcaccttgcctcctgcttgaggacgtttgtgccctgcaggagaacaatagaagaacaattcgagaacaatgacagaacaatctaagaacaatactagaacaattgcagaacaatgtaagaacaatggcgcgccatgcttcatcagactct

SEQ ID NO: 1001 - DNA, 156 bp, Artificial Sequence; identical to SEQ ID NO: 1000
  Synthetic polynucleotide

SEQ ID NO: 1002 - DNA, 197 bp, Artificial Sequence
  Synthetic polynucleotide
atcatctcaccttgcctcctgaagattctgccctggctcctgcagggcctttgttttgcaaagagcctttgttttgcaatcggcctttgttttgcaagacgcctttgttttgcaactagcctttgttttgcaaactgcctttgttttgcaatgcgcctttgttttgcaagtaggcgcgccatgcttcatcagactct

SEQ ID NO: 1003 - DNA, 197 bp, Artificial Sequence; identical to SEQ ID NO: 1002
  Synthetic polynucleotide

SEQ ID NO: 1004 - DNA, 180 bp, Artificial Sequence
  Synthetic polynucleotide
atcatctcaccttgcctcctgctaaaccttagtgcttacctgcaggatatataataaagaatatataataatcgatatataataagacatatataataactaatatataataaactatatataataatgcatatataataagtaatatataataaggcgcgccatgcttcatcagactct

SEQ ID NO: 1005 - DNA, 180 bp, Artificial Sequence; identical to SEQ ID NO: 1004
  Synthetic polynucleotide

SEQ ID NO: 1006 - DNA, 196 bp, Artificial Sequence
  Synthetic polynucleotide
atcatctcaccttgcctcctgatcctctgacggatgggcctgcagggtaaacataaacaagagtaaacataaacatcggtaaacataaacagacgtaaacataaacactagtaaacataaacaactgtaaacataaacatgcgtaaacataaacagtagtaaacataaacaggcgcgccatgcttcatcagactct

SEQ ID NO: 1007 - DNA, 196 bp, Artificial Sequence; identical to SEQ ID NO: 1006
  Synthetic polynucleotide

SEQ ID NO: 1008 - DNA, 191 bp, Artificial Sequence
  Synthetic polynucleotide
atcatctcaccttgcctcctgggatggcccatcaaatgcctgcaggcgaattaattaacaataagacgaattaattaacaatatcgcgaattaattaacaatagaccgaattaattaacaatactacgaattaattaacaataactcgaattaattaacaatatgcggcgcgccatgcttcatcagactct

SEQ ID NO: 1009 - DNA, 191 bp, Artificial Sequence; identical to SEQ ID NO: 1008
  Synthetic polynucleotide

SEQ ID NO: 1010 - DNA, 185 bp, Artificial Sequence
  Synthetic polynucleotide
atcatctcaccttgcctcctgcatcaatctactcggcgcctgcaggagtctatttatagcttagaagtctatttatagctttcgagtctatttatagcttgacagtctatttatagcttctaagtctatttatagcttactagtctatttatagctttgcggcgcgccatgcttcatcagactct

SEQ ID NO: 1011 - DNA, 185 bp, Artificial Sequence; identical to SEQ ID NO: 1010
  Synthetic polynucleotide

SEQ ID NO: 1012 - DNA, 197 bp, Artificial Sequence
  Synthetic polynucleotide
atcatctcaccttgcctcctgtacgagtgtctgaggttcctgcaggcactgcgcatgcgcaagacactgcgcatgcgcatcgcactgcgcatgcgcagaccactgcgcatgcgcactacactgcgcatgcgcaactcactgcgcatgcgcatgccactgcgcatgcgcagtaggcgcgccatgcttcatcagactct

SEQ ID NO: 1013 - DNA, 197 bp, Artificial Sequence; identical to SEQ ID NO: 1012
  Synthetic polynucleotide

SEQ ID NO: 1014 - DNA, 197 bp, Artificial Sequence
  Synthetic polynucleotide
atcatctcaccttgcctcctggagctgcgaactatagtcctgcagggtcccgggttcgaatcccagagtcccgggttcgaatccctcggtcccgggttcgaatcccgacgtcccgggttcgaatcccctagtcccgggttcgaatcccactgtcccgggttcgaatccctgcggcgcgccatgcttcatcagactct

SEQ ID NO: 1015 - DNA, 197 bp, Artificial Sequence; identical to SEQ ID NO: 1014
  Synthetic polynucleotide

SEQ ID NO: 1016 - DNA, 188 bp, Artificial Sequence
  Synthetic polynucleotide
atcatctcaccttgcctcctgttgagcagaagccaattcctgcaggtgcccccgggcaagatgcccccgggcatcgtgcccccgggcagactgcccccgggcactatgcccccgggcaacttgcccccgggcatgctgcccccgggcagtatgcccccgggcaggcgcgccatgcttcatcagactct

SEQ ID NO: 1017 - DNA, 188 bp, Artificial Sequence; identical to SEQ ID NO: 1016
  Synthetic polynucleotide

SEQ ID NO: 1018 - DNA, 180 bp, Artificial Sequence
  Synthetic polynucleotide
atcatctcaccttgcctcctgcctaataccgagtaacccctgcaggggccacacccaagaggccacacccatcgggccacacccagacggccacacccactaggccacacccaactggccacacccatgcggccacacccagtaggccacacccaggcgcgccatgcttcatcagactct

SEQ ID NO: 1019 - DNA, 180 bp, Artificial Sequence; identical to SEQ ID NO: 1018
  Synthetic polynucleotide

SEQ ID NO: 1020 - DNA, 156 bp, Artificial Sequence
  Synthetic polynucleotide
atcatctcaccttgcctcctggagtcgcacgatcttggcctgcaggctgtcaaaagactgtcaaatcgctgtcaaagacctgtcaaactactgtcaaaactctgtcaaatgcctgtcaaagtactgtcaaaggcgcgccatgcttcatcagactct

SEQ ID NO: 1021 - DNA, 156 bp, Artificial Sequence; identical to SEQ ID NO: 1020
  Synthetic polynucleotide

SEQ ID NO: 1022 - DNA, 196 bp, Artificial Sequence
  Synthetic polynucleotide
atcatctcaccttgcctcctgtgacgtaaaccgttgaacctgcaggccctggggagctgagaccctggggagctgtcgccctggggagctggacccctggggagctgctaccctggggagctgactccctggggagctgtgcccctggggagctggtaccctggggagctgggcgcgccatgcttcatcagactct

SEQ ID NO: 1023 - DNA, 196 bp, Artificial Sequence; identical to SEQ ID NO: 1022
  Synthetic polynucleotide

SEQ ID NO: 1024 - DNA, 180 bp, Artificial Sequence
  Synthetic polynucleotide
atcatctcaccttgcctcctgccagagatagtgccacacctgcagggctccttggcgagagctccttggcgtcggctccttggcggacgctccttggcgctagctccttggcgactgctccttggcgtgcgctccttggcggtagctccttggcgggcgcgccatgcttcatcagactct

SEQ ID NO: 1025 - DNA, 180 bp, Artificial Sequence; identical to SEQ ID NO: 1024
  Synthetic polynucleotide

SEQ ID NO: 1026 - DNA, 148 bp, Artificial Sequence
  Synthetic polynucleotide
atcatctcaccttgcctcctgagtcgacaaggtgagcccctgcaggcagtgggagacagtgggtcgcagtggggaccagtgggctacagtgggactcagtgggtgccagtggggtacagtgggggcgcgccatgcttcatcagactct

SEQ ID NO: 1027 - DNA, 148 bp, Artificial Sequence; identical to SEQ ID NO: 1026
  Synthetic polynucleotide

SEQ ID NO: 1028 - DNA, 191 bp, Artificial Sequence
  Synthetic polynucleotide
atcatctcaccttgcctcctggtttggtagttctgaggcctgcaggcttaaaaacgatgttttagacttaaaaacgatgtttttcgcttaaaaacgatgttttgaccttaaaaacgatgttttctacttaaaaacgatgttttactcttaaaaacgatgtttttgcggcgcgccatgcttcatcagactct

SEQ ID NO: 1029 - DNA, 191 bp, Artificial Sequence; identical to SEQ ID NO: 1028
  Synthetic polynucleotide

SEQ ID NO: 1030 - DNA, 180 bp, Artificial Sequence
  Synthetic polynucleotide
atcatctcaccttgcctcctggattggcgtaaacgtcacctgcaggctgcagctgtcagactgcagctgtctcgctgcagctgtcgacctgcagctgtcctactgcagctgtcactctgcagctgtctgcctgcagctgtcgtactgcagctgtcggcgcgccatgcttcatcagactct

SEQ ID NO: 1031 - DNA, 180 bp, Artificial Sequence; identical to SEQ ID NO: 1030
  Synthetic polynucleotide

SEQ ID NO: 1032 - DNA, 200 bp, Artificial Sequence
  Synthetic polynucleotide
atcatctcaccttgcctcctgaacgaaggttggcctaccctgcagggcctgctgggagttgtagtagagcctgctgggagttgtagttcggcctgctgggagttgtagtgacgcctgctgggagttgtagtctagcctgctgggagttgtagtactgcctgctgggagttgtagtggcgcgccatgcttcatcagactct

SEQ ID NO: 1033 - DNA, 200 bp, Artificial Sequence; identical to SEQ ID NO: 1032
  Synthetic polynucleotide

SEQ ID NO: 1034 - DNA, 185 bp, Artificial Sequence
  Synthetic polynucleotide
atcatctcaccttgcctcctggtgtaacaaacggcgagcctgcaggattaacaggtgttcacagaattaacaggtgttcactcgattaacaggtgttcacgacattaacaggtgttcacctaattaacaggtgttcacactattaacaggtgttcactgcggcgcgccatgcttcatcagactct

SEQ ID NO: 1035 - DNA, 185 bp, Artificial Sequence; identical to SEQ ID NO: 1034
  Synthetic polynucleotide

SEQ ID NO: 1036 - DNA, 164 bp, Artificial Sequence
  Synthetic polynucleotide
atcatctcaccttgcctcctgccgatacatctaggctccctgcagggccacgtgtagagccacgtgttcggccacgtgtgacgccacgtgtctagccacgtgtactgccacgtgttgcgccacgtgtgtagccacgtgtggcgcgccatgcttcatcagactct

SEQ ID NO: 1037 - DNA, 164 bp, Artificial Sequence; identical to SEQ ID NO: 1036
  Synthetic polynucleotide

SEQ ID NO: 1038 - DNA, 190 bp, Artificial Sequence
  Synthetic polynucleotide
atcatctcaccttgcctcctgttgtcctctacgattatcctgcaggaggtcattgaccctagaaggtcattgacccttcgaggtcattgaccctgacaggtcattgaccctctaaggtcattgaccctactaggtcattgacccttgcaggtcattgaccctgtaggcgcgccatgcttcatcagactct

SEQ ID NO: 1039 - DNA, 190 bp, Artificial Sequence; identical to SEQ ID NO: 1038
  Synthetic polynucleotide

SEQ ID NO: 1040 - DNA, 191 bp, Artificial Sequence
  Synthetic polynucleotide
atcatctcaccttgcctcctgacccaatagttgggattcctgcaggtatagatcaaaggaaaaagatatagatcaaaggaaaatcgtatagatcaaaggaaaagactatagatcaaaggaaaactatatagatcaaaggaaaaacttatagatcaaaggaaaatgcggcgcgccatgcttcatcagactct

SEQ ID NO: 1041 - DNA, 191 bp, Artificial Sequence; identical to SEQ ID NO: 1040
  Synthetic polynucleotide

SEQ ID NO: 1042 - DNA, 197 bp, Artificial Sequence
  Synthetic polynucleotide
atcatctcaccttgcctcctgtatggtccacggaagcgcctgcaggtgacctctcttgacctttagatgacctctcttgaccttttcgtgacctctcttgacctttgactgacctctcttgacctttctatgacctctcttgacctttacttgacctctcttgaccttttgcggcgcgccatgcttcatcagactct

SEQ ID NO: 1043 - DNA, 197 bp, Artificial Sequence; identical to SEQ ID NO: 1042
  Synthetic polynucleotide

SEQ ID NO: 1044 - DNA, 196 bp, Artificial Sequence
  Synthetic polynucleotide
atcatctcaccttgcctcctgtcgttagaacgcacattcctgcaggctctgattggctgagactctgattggctgtcgctctgattggctggacctctgattggctgctactctgattggctgactctctgattggctgtgcctctgattggctggtactctgattggctgggcgcgccatgcttcatcagactct

SEQ ID NO: 1045 - DNA, 196 bp, Artificial Sequence; identical to SEQ ID NO: 1044
  Synthetic polynucleotide

SEQ ID NO: 1046 - DNA, 180 bp, Artificial Sequence
  Synthetic polynucleotide
atcatctcaccttgcctcctgctacctcgaagttaactcctgcaggctgcagctgtgagactgcagctgtgtcgctgcagctgtggacctgcagctgtgctactgcagctgtgactctgcagctgtgtgcctgcagctgtggtactgcagctgtgggcgcgccatgcttcatcagactct

SEQ ID NO: 1047 - DNA, 180 bp, Artificial Sequence; identical to SEQ ID NO: 1046
  Synthetic polynucleotide

SEQ ID NO: 1048 - DNA, 197 bp, Artificial Sequence
  Synthetic polynucleotide
atcatctcaccttgcctcctgccattgggctgctttcgcctgcaggtaattacgctaattaagataattacgctaattatcgtaattacgctaattagactaattacgctaattactataattacgctaattaacttaattacgctaattatgctaattacgctaattagtaggcgcgccatgcttcatcagactct

SEQ ID NO: 1049 - DNA, 197 bp, Artificial Sequence; identical to SEQ ID NO: 1048
  Synthetic polynucleotide

SEQ ID NO: 1050 - DNA, 188 bp, Artificial Sequence
  Synthetic polynucleotide
atcatctcaccttgcctcctggagtgctgcagaatgaacctgcagggctataaatagcagagctataaatagctcggctataaatagcgacgctataaatagcctagctataaatagcactgctataaatagctgcgctataaatagcgtagctataaatagcggcgcgccatgcttcatcagactct

SEQ ID NO: 1051 - DNA, 188 bp, Artificial Sequence; identical to SEQ ID NO: 1050
  Synthetic polynucleotide

SEQ ID NO: 1052 - DNA, 191 bp, Artificial Sequence
  Synthetic polynucleotide
atcatctcaccttgcctcctgatttcttgtctagttggcctgcagggtgggctaattagttcaagagtgggctaattagttcatcggtgggctaattagttcagacgtgggctaattagttcactagtgggctaattagttcaactgtgggctaattagttcatgcggcgcgccatgcttcatcagactct

SEQ ID NO: 1053 - DNA, 191 bp, Artificial Sequence; identical to SEQ ID NO: 1052
  Synthetic polynucleotide

SEQ ID NO: 1054 - DNA, 172 bp, Artificial Sequence
  Synthetic polynucleotide
atcatctcaccttgcctcctggatgcgagttaagactgcctgcaggtcttaagtggagatcttaagtggtcgtcttaagtgggactcttaagtggctatcttaagtggacttcttaagtggtgctcttaagtgggtatcttaagtggggcgcgccatgcttcatcagactct

SEQ ID NO: 1055 - DNA, 172 bp, Artificial Sequence; identical to SEQ ID NO: 1054
  Synthetic polynucleotide

SEQ ID NO: 1056 - DNA, 196 bp, Artificial Sequence
  Synthetic polynucleotide
atcatctcaccttgcctcctgagcgtacccattctggtcctgcaggagcccaaggtcacagaagcccaaggtcactcgagcccaaggtcacgacagcccaaggtcacctaagcccaaggtcacactagcccaaggtcactgcagcccaaggtcacgtaagcccaaggtcacggcgcgccatgcttcatcagactct

SEQ ID NO: 1057 - DNA, 196 bp, Artificial Sequence; identical to SEQ ID NO: 1056
  Synthetic polynucleotide

SEQ ID NO: 1058 - DNA, 185 bp, Artificial Sequence
  Synthetic polynucleotide
atcatctcaccttgcctcctgaccaacttagttctaagcctgcagggcggcggcagcggggcagagcggcggcagcggggctcggcggcggcagcggggcgacgcggcggcagcggggcctagcggcggcagcggggcactgcggcggcagcggggctgcggcgcgccatgcttcatcagactct

SEQ ID NO: 1059 - DNA, 185 bp, Artificial Sequence; identical to SEQ ID NO: 1058
  Synthetic polynucleotide

SEQ ID NO: 1060 - DNA, 188 bp, Artificial Sequence
  Synthetic polynucleotide
atcatctcaccttgcctcctggtgtcgttgtcactcatcctgcaggatttttacgaccagaatttttacgacctcgatttttacgaccgacatttttacgaccctaatttttacgaccactatttttacgacctgcatttttacgaccgtaatttttacgaccggcgcgccatgcttcatcagactct

SEQ ID NO: 1061 - DNA, 188 bp, Artificial Sequence; identical to SEQ ID NO: 1060
  Synthetic polynucleotide

SEQ ID NO: 1062 - DNA, 180 bp, Artificial Sequence
  Synthetic polynucleotide
atcatctcaccttgcctcctgaggcaacatatctcctgcctgcaggtcgcgccaaacagatcgcgccaaactcgtcgcgccaaacgactcgcgccaaacctatcgcgccaaacacttcgcgccaaactgctcgcgccaaacgtatcgcgccaaacggcgcgccatgcttcatcagactct

SEQ ID NO: 1063 - DNA, 180 bp, Artificial Sequence; identical to SEQ ID NO: 1062
  Synthetic polynucleotide

SEQ ID NO: 1064 - DNA, 172 bp, Artificial Sequence
  Synthetic polynucleotide
atcatctcaccttgcctcctgtaacttaaccaccatcccctgcaggtttattgcggagatttattgcggtcgtttattgcgggactttattgcggctatttattgcggacttttattgcggtgctttattgcgggtatttattgcggggcgcgccatgcttcatcagactct

SEQ ID NO: 1065 - DNA, 172 bp, Artificial Sequence; identical to SEQ ID NO: 1064
  Synthetic polynucleotide

SEQ ID NO: 1066 - DNA, 180 bp, Artificial Sequence
  Synthetic polynucleotide
atcatctcaccttgcctcctggaactgcaaatactgcccctgcaggacgcccacgcaagaacgcccacgcatcgacgcccacgcagacacgcccacgcactaacgcccacgcaactacgcccacgcatgcacgcccacgcagtaacgcccacgcaggcgcgccatgcttcatcagactct

SEQ ID NO: 1067 - DNA, 180 bp, Artificial Sequence; identical to SEQ ID NO: 1066
  Synthetic polynucleotide

SEQ ID NO: 1068 - DNA, 191 bp, Artificial Sequence
  Synthetic polynucleotide
atcatctcaccttgcctcctgttcgcgcatattgtagacctgcagggttgacctttgacctttagagttgacctttgaccttttcggttgacctttgacctttgacgttgacctttgacctttctagttgacctttgacctttactgttgacctttgaccttttgcggcgcgccatgcttcatcagactct

SEQ ID NO: 1069 - DNA, 191 bp, Artificial Sequence; identical to SEQ ID NO: 1068
  Synthetic polynucleotide

SEQ ID NO: 1070 - DNA, 132 bp, Artificial Sequence
  Synthetic polynucleotide
atcatctcaccttgcctcctgagtacgtggaagagaatcctgcaggtatccagatatcctcgtatccgactatccctatatccacttatcctgctatccgtatatccggcgcgccatgcttcatcagactct

SEQ ID NO: 1071 - DNA, 132 bp, Artificial Sequence; identical to SEQ ID NO: 1070
  Synthetic polynucleotide

SEQ ID NO: 1072 - DNA, 197 bp, Artificial Sequence
  Synthetic polynucleotide
atcatctcaccttgcctcctgcaaatttcccaggcgaacctgcaggctggggggggcagataagagactggggggggcagataagtcgctggggggggcagataaggacctggggggggcagataagctactggggggggcagataagactctggggggggcagataagtgcggcgcgccatgcttcatcagactct

SEQ ID NO: 1073 - DNA, 197 bp, Artificial Sequence; identical to SEQ ID NO: 1072
  Synthetic polynucleotide

SEQ ID NO: 1074 - DNA, 132 bp, Artificial Sequence
  Synthetic polynucleotide
atcatctcaccttgcctcctggatgtatctatcggcttcctgcaggtatcaagatatcatcgtatcagactatcactatatcaacttatcatgctatcagtatatcaggcgcgccatgcttcatcagactct

SEQ ID NO: 1075 - DNA, 132 bp, Artificial Sequence; identical to SEQ ID NO: 1074
  Synthetic polynucleotide

SEQ ID NO: 1076 - DNA, 172 bp, Artificial Sequence
  Synthetic polynucleotide
atcatctcaccttgcctcctgggtctcgggctatagctcctgcagggtacgtgaccagagtacgtgacctcggtacgtgaccgacgtacgtgaccctagtacgtgaccactgtacgtgacctgcgtacgtgaccgtagtacgtgaccggcgcgccatgcttcatcagactct

SEQ ID NO: 1077 - DNA, 172 bp, Artificial Sequence; identical to SEQ ID NO: 1076
  Synthetic polynucleotide

SEQ ID NO: 1078 - DNA, 191 bp, Artificial Sequence
  Synthetic polynucleotide
atcatctcaccttgcctcctgcaattacgttggtgaatcctgcaggcccacctgccatctaggagacccacctgccatctaggtcgcccacctgccatctagggaccccacctgccatctaggctacccacctgccatctaggactcccacctgccatctaggtgcggcgcgccatgcttcatcagactct

SEQ ID NO: 1079 - DNA, 191 bp, Artificial Sequence; identical to SEQ ID NO: 1078
  Synthetic polynucleotide

SEQ ID NO: 1080 - DNA, 185 bp, Artificial Sequence
  Synthetic polynucleotide
atcatctcaccttgcctcctgtgcaatgttccggcctccctgcaggctactaattaatgctgagactactaattaatgctgtcgctactaattaatgctggacctactaattaatgctgctactactaattaatgctgactctactaattaatgctgtgcggcgcgccatgcttcatcagactct

SEQ ID NO: 1081 - DNA, 185 bp, Artificial Sequence; identical to SEQ ID NO: 1080
  Synthetic polynucleotide

SEQ ID NO: 1082 - DNA, 164 bp, Artificial Sequence
  Synthetic polynucleotide
atcatctcaccttgcctcctgtgagatgcatgacagatcctgcagggaaaacaatagagaaaacaattcggaaaacaatgacgaaaacaatctagaaaacaatactgaaaacaattgcgaaaacaatgtagaaaacaatggcgcgccatgcttcatcagactct

SEQ ID NO: 1083 - DNA, 164 bp, Artificial Sequence; identical to SEQ ID NO: 1082
  Synthetic polynucleotide

SEQ ID NO: 1084 - DNA, 172 bp, Artificial Sequence
  Synthetic polynucleotide
atcatctcaccttgcctcctgacaaatctttggtcgcgcctgcaggcgcagctgcgagacgcagctgcgtcgcgcagctgcggaccgcagctgcgctacgcagctgcgactcgcagctgcgtgccgcagctgcggtacgcagctgcgggcgcgccatgcttcatcagactct

SEQ ID NO: 1085 - DNA, 172 bp, Artificial Sequence; identical to SEQ ID NO: 1084
  Synthetic polynucleotide

SEQ ID NO: 1086 - DNA, 164 bp, Artificial Sequence
  Synthetic polynucleotide
atcatctcaccttgcctcctgaaattagtcagcgtgctcctgcaggttgcgcacgagattgcgcacgtcgttgcgcacggacttgcgcacgctattgcgcacgactttgcgcacgtgcttgcgcacggtattgcgcacgggcgcgccatgcttcatcagactct

SEQ ID NO: 1087 - DNA, 164 bp, Artificial Sequence; identical to SEQ ID NO: 1086
  Synthetic polynucleotide

SEQ ID NO: 1088 - DNA, 180 bp, Artificial Sequence
  Synthetic polynucleotide
atcatctcaccttgcctcctgagcctatattagggtcacctgcagggccctgacctcagagccctgacctctcggccctgacctcgacgccctgacctcctagccctgacctcactgccctgacctctgcgccctgacctcgtagccctgacctcggcgcgccatgcttcatcagactct

SEQ ID NO: 1089 - DNA, 180 bp, Artificial Sequence; identical to SEQ ID NO: 1088
  Synthetic polynucleotide

SEQ ID NO: 1090 - DNA, 185 bp, Artificial Sequence
  Synthetic polynucleotide
atcatctcaccttgcctcctgagtcctcatatgaccaccctgcaggtcagcaccatggacagagatcagcaccatggacagtcgtcagcaccatggacaggactcagcaccatggacagctatcagcaccatggacagacttcagcaccatggacagtgcggcgcgccatgcttcatcagactct

SEQ ID NO: 1091 - DNA, 185 bp, Artificial Sequence; identical to SEQ ID NO: 1090
  Synthetic polynucleotide

SEQ ID NO: 1092 - DNA, 164 bp, Artificial Sequence
  Synthetic polynucleotide
atcatctcaccttgcctcctgaagacgtctcgtgtgcccctgcaggttatcttgtagattatcttgttcgttatcttgtgacttatcttgtctattatcttgtactttatcttgttgcttatcttgtgtattatcttgtggcgcgccatgcttcatcagactct

SEQ ID NO: 1093 - DNA, 164 bp, Artificial Sequence; identical to SEQ ID NO: 1092
  Synthetic polynucleotide

SEQ ID NO: 1094 - DNA, 188 bp, Artificial Sequence
  Synthetic polynucleotide
atcatctcaccttgcctcctgctttgcataagcaagtgcctgcaggcccggtgaacccagacccggtgaaccctcgcccggtgaacccgaccccggtgaacccctacccggtgaacccactcccggtgaaccctgccccggtgaacccgtacccggtgaacccggcgcgccatgcttcatcagactct

SEQ ID NO: 1095 - DNA, 188 bp, Artificial Sequence; identical to SEQ ID NO: 1094
  Synthetic polynucleotide

SEQ ID NO: 1096 - DNA, 185 bp, Artificial Sequence
  Synthetic polynucleotide
atcatctcaccttgcctcctgcccagttcgcctattcgcctgcaggaaggtaattagctcatagaaaggtaattagctcattcgaaggtaattagctcatgacaaggtaattagctcatctaaaggtaattagctcatactaaggtaattagctcattgcggcgcgccatgcttcatcagactct

SEQ ID NO: 1097 - DNA, 185 bp, Artificial Sequence; identical to SEQ ID NO: 1096
  Synthetic polynucleotide

SEQ ID NO: 1098 - DNA, 190 bp, Artificial Sequence
  Synthetic polynucleotide
atcatctcaccttgcctcctgctcagtaatccgcgatccctgcaggaggagggggcagtgagaaggagggggcagtgtcgaggagggggcagtggacaggagggggcagtgctaaggagggggcagtgactaggagggggcagtgtgcaggagggggcagtggtaggcgcgccatgcttcatcagactct

SEQ ID NO: 1099 - DNA, 190 bp, Artificial Sequence; identical to SEQ ID NO: 1098
  Synthetic polynucleotide

SEQ ID NO: 1100 - DNA, 180 bp, Artificial Sequence
  Synthetic polynucleotide
atcatctcaccttgcctcctgattcaggttgcataaagcctgcaggcgatgacgtcaagacgatgacgtcatcgcgatgacgtcagaccgatgacgtcactacgatgacgtcaactcgatgacgtcatgccgatgacgtcagtacgatgacgtcaggcgcgccatgcttcatcagactct

SEQ ID NO: 1101 - DNA, 180 bp, Artificial Sequence; identical to SEQ ID NO: 1100
  Synthetic polynucleotide

SEQ ID NO: 1102 - DNA, 196 bp, Artificial Sequence
  Synthetic polynucleotide
atcatctcaccttgcctcctgctcaagatagctcggttcctgcaggtgtttgtttacctagatgtttgtttaccttcgtgtttgtttacctgactgtttgtttacctctatgtttgtttacctacttgtttgtttaccttgctgtttgtttacctgtatgtttgtttacctggcgcgccatgcttcatcagactct

SEQ ID NO: 1103 - DNA, 196 bp, Artificial Sequence; identical to SEQ ID NO: 1102
  Synthetic polynucleotide

SEQ ID NO: 1104 - DNA, 200 bp, Artificial Sequence
  Synthetic polynucleotide
atcatctcaccttgcctcctgggtgattgcacaaggtgcctgcaggccgcggttgccatggcaacagaccgcggttgccatggcaactcgccgcggttgccatggcaacgacccgcggttgccatggcaacctaccgcggttgccatggcaacactccgcggttgccatggcaacggcgcgccatgcttcatcagactct

SEQ ID NO: 1105 - DNA, 200 bp, Artificial Sequence; identical to SEQ ID NO: 1104
  Synthetic polynucleotide

SEQ ID NO: 1106 - DNA, 180 bp, Artificial Sequence
  Synthetic polynucleotide
atcatctcaccttgcctcctgcctcaccatctcacaagcctgcaggctgcagctgttagactgcagctgtttcgctgcagctgttgacctgcagctgttctactgcagctgttactctgcagctgtttgcctgcagctgttgtactgcagctgttggcgcgccatgcttcatcagactct

SEQ ID NO: 1107 - DNA, 180 bp, Artificial Sequence; identical to SEQ ID NO: 1106
  Synthetic polynucleotide

SEQ ID NO: 1108 - DNA, 156 bp, Artificial Sequence
  Synthetic polynucleotide
atcatctcaccttgcctcctgatccaagatgtcctaagcctgcaggatagcaacagaatagcaactcgatagcaacgacatagcaacctaatagcaacactatagcaactgcatagcaacgtaatagcaacggcgcgccatgcttcatcagactct

SEQ ID NO: 1109 - DNA, 156 bp, Artificial Sequence; identical to SEQ ID NO: 1108
  Synthetic polynucleotide

SEQ ID NO: 1110 - DNA, 185 bp, Artificial Sequence
  Synthetic polynucleotide
atcatctcaccttgcctcctgtctacctggtttatcaacctgcaggggggtcaaagtccaatagaggggtcaaagtccaattcgggggtcaaagtccaatgacggggtcaaagtccaatctaggggtcaaagtccaatactggggtcaaagtccaattgcggcgcgccatgcttcatcagactct

SEQ ID NO: 1111 - DNA, 185 bp, Artificial Sequence; identical to SEQ ID NO: 1110
  Synthetic polynucleotide

SEQ ID NO: 1112 - DNA, 156 bp, Artificial Sequence
  Synthetic polynucleotide
atcatctcaccttgcctcctgactttatattctgccgacctgcaggtttaatggagatttaatggtcgtttaatgggactttaatggctatttaatggacttttaatggtgctttaatgggtatttaatggggcgcgccatgcttcatcagactct

SEQ ID NO: 1113 - DNA, 156 bp, Artificial Sequence; identical to SEQ ID NO: 1112
  Synthetic polynucleotide

SEQ ID NO: 1114 - DNA, 191 bp, Artificial Sequence
  Synthetic polynucleotide
atcatctcaccttgcctcctgtccaactactcgcccaccctgcaggcgcgttaattaattatgagacgcgttaattaattatgtcgcgcgttaattaattatggaccgcgttaattaattatgctacgcgttaattaattatgactcgcgttaattaattatgtgcggcgcgccatgcttcatcagactct

SEQ ID NO: 1115 - DNA, 191 bp, Artificial Sequence; identical to SEQ ID NO: 1114
  Synthetic polynucleotide

SEQ ID NO: 1116 - DNA, 164 bp, Artificial Sequence
  Synthetic polynucleotide
atcatctcaccttgcctcctggggtagttctcgccttacctgcaggtcatgtaatagatcatgtaattcgtcatgtaatgactcatgtaatctatcatgtaatacttcatgtaattgctcatgtaatgtatcatgtaatggcgcgccatgcttcatcagactct

SEQ ID NO: 1117 - DNA, 164 bp, Artificial Sequence; identical to SEQ ID NO: 1116
  Synthetic polynucleotide

SEQ ID NO: 1118 - DNA, 196 bp, Artificial Sequence
  Synthetic polynucleotide
atcatctcaccttgcctcctgggtaacttcgtagacctcctgcagggcaaagcaaacaaagagcaaagcaaacaatcggcaaagcaaacaagacgcaaagcaaacaactagcaaagcaaacaaactgcaaagcaaacaatgcgcaaagcaaacaagtagcaaagcaaacaaggcgcgccatgcttcatcagactct

SEQ ID NO: 1119 - DNA, 196 bp, Artificial Sequence; identical to SEQ ID NO: 1118
  Synthetic polynucleotide

SEQ ID NO: 1120 - DNA, 185 bp, Artificial Sequence
  Synthetic polynucleotide
atcatctcaccttgcctcctgttacgcacttatgtggtcctgcagggtgaacacctgttattagagtgaacacctgttatttcggtgaacacctgttattgacgtgaacacctgttattctagtgaacacctgttattactgtgaacacctgttatttgcggcgcgccatgcttcatcagactct

SEQ ID NO: 1121 - DNA, 185 bp, Artificial Sequence; identical to SEQ ID NO: 1120
  Synthetic polynucleotide

SEQ ID NO: 1122 - DNA, 191 bp, Artificial Sequence
  Synthetic polynucleotide
atcatctcaccttgcctcctggctggatgactgtaactcctgcaggtttttagttaactaagtagatttttagttaactaagttcgtttttagttaactaagtgactttttagttaactaagtctatttttagttaactaagtacttttttagttaactaagttgcggcgcgccatgcttcatcagactct

SEQ ID NO: 1123 - DNA, 191 bp, Artificial Sequence; identical to SEQ ID NO: 1122
  Synthetic polynucleotide

SEQ ID NO: 1124 - DNA, 156 bp, Artificial Sequence
  Synthetic polynucleotide
atcatctcaccttgcctcctggggtttcagcacaaattcctgcaggtttaatgaagatttaatgatcgtttaatgagactttaatgactatttaatgaacttttaatgatgctttaatgagtatttaatgaggcgcgccatgcttcatcagactct

SEQ ID NO: 1125 - DNA, 156 bp, Artificial Sequence; identical to SEQ ID NO: 1124
  Synthetic polynucleotide

SEQ ID NO: 1126 - DNA, 148 bp, Artificial Sequence
  Synthetic polynucleotide
atcatctcaccttgcctcctgcacggacccatttacgtcctgcaggacaattaagaacaattatcgacaattagacacaattactaacaattaactacaattatgcacaattagtaacaattaggcgcgccatgcttcatcagactct

SEQ ID NO: 1127 - DNA, 148 bp, Artificial Sequence; identical to SEQ ID NO: 1126
  Synthetic polynucleotide

SEQ ID NO: 1128 - DNA, 180 bp, Artificial Sequence
  Synthetic polynucleotide
atcatctcaccttgcctcctgtatgactctggtgagaccctgcagggatgactcacgagagatgactcacgtcggatgactcacggacgatgactcacgctagatgactcacgactgatgactcacgtgcgatgactcacggtagatgactcacgggcgcgccatgcttcatcagactct

SEQ ID NO: 1129 - DNA, 180 bp, Artificial Sequence; identical to SEQ ID NO: 1128
  Synthetic polynucleotide

SEQ ID NO: 1130 - DNA, 172 bp, Artificial Sequence
  Synthetic polynucleotide
atcatctcaccttgcctcctggaactagttgctgttgtcctgcaggaaaggtcaagagaaaaggtcaagtcgaaaggtcaaggacaaaggtcaagctaaaaggtcaagactaaaggtcaagtgcaaaggtcaaggtaaaaggtcaagggcgcgccatgcttcatcagactct

SEQ ID NO: 1131 - DNA, 172 bp, Artificial Sequence; identical to SEQ ID NO: 1130
  Synthetic polynucleotide

SEQ ID NO: 1132 - DNA, 172 bp, Artificial Sequence
  Synthetic polynucleotide
atcatctcaccttgcctcctgaactggacagataaactcctgcaggtatgcgggtaagatatgcgggtatcgtatgcgggtagactatgcgggtactatatgcgggtaacttatgcgggtatgctatgcgggtagtatatgcgggtaggcgcgccatgcttcatcagactct

SEQ ID NO: 1133 - DNA, 172 bp, Artificial Sequence; identical to SEQ ID NO: 1132
  Synthetic polynucleotide

SEQ ID NO: 1134 - DNA, 191 bp, Artificial Sequence
  Synthetic polynucleotide
atcatctcaccttgcctcctggggcatagggcaataaccctgcaggtaatgccacgtgcccccagataatgccacgtgccccctcgtaatgccacgtgcccccgactaatgccacgtgcccccctataatgccacgtgcccccacttaatgccacgtgccccctgcggcgcgccatgcttcatcagactct

SEQ ID NO: 1135 - DNA, 191 bp, Artificial Sequence; identical to SEQ ID NO: 1134
  Synthetic polynucleotide

SEQ ID NO: 1136 - DNA, 196 bp, Artificial Sequence
  Synthetic polynucleotide
atcatctcaccttgcctcctgctacaggccatacgctacctgcagggggtcaaaggtcaagagggtcaaaggtcatcggggtcaaaggtcagacgggtcaaaggtcactagggtcaaaggtcaactgggtcaaaggtcatgcgggtcaaaggtcagtagggtcaaaggtcaggcgcgccatgcttcatcagactct

SEQ ID NO: 1137 - DNA, 196 bp, Artificial Sequence; identical to SEQ ID NO: 1136
  Synthetic polynucleotide

SEQ ID NO: 1138 - DNA, 156 bp, Artificial Sequence
  Synthetic polynucleotide
atcatctcaccttgcctcctgtattgcgatggagccaacctgcaggtttgtggtagatttgtggttcgtttgtggtgactttgtggtctatttgtggtacttttgtggttgctttgtggtgtatttgtggtggcgcgccatgcttcatcagactct

SEQ ID NO: 1139 - DNA, 156 bp, Artificial Sequence; identical to SEQ ID NO: 1138
  Synthetic polynucleotide

SEQ ID NO: 1140 - DNA, 180 bp, Artificial Sequence
  Synthetic polynucleotide
atcatctcaccttgcctcctgtgcacacgtacgacaatcctgcaggacaaaccacagagaacaaaccacagtcgacaaaccacaggacacaaaccacagctaacaaaccacagactacaaaccacagtgcacaaaccacaggtaacaaaccacagggcgcgccatgcttcatcagactct

SEQ ID NO: 1141 - DNA, 180 bp, Artificial Sequence; identical to SEQ ID NO: 1140
  Synthetic polynucleotide

SEQ ID NO: 1142 - DNA, 197 bp, Artificial Sequence
  Synthetic polynucleotide
atcatctcaccttgcctcctgccgagactgagtcttgccctgcagggctgttgccagggagagagctgttgccagggagtcggctgttgccagggaggacgctgttgccagggagctagctgttgccagggagactgctgttgccagggagtgcgctgttgccagggaggtaggcgcgccatgcttcatcagactct

SEQ ID NO: 1143 - DNA, 197 bp, Artificial Sequence; identical to SEQ ID NO: 1142
  Synthetic polynucleotide

SEQ ID NO: 1144 - DNA, 180 bp, Artificial Sequence
  Synthetic polynucleotide
atcatctcaccttgcctcctgatcctaatctgaaccgtcctgcaggtatgtgggtcaagatatgtgggtcatcgtatgtgggtcagactatgtgggtcactatatgtgggtcaacttatgtgggtcatgctatgtgggtcagtatatgtgggtcaggcgcgccatgcttcatcagactct

SEQ ID NO: 1145 - DNA, 180 bp, Artificial Sequence; identical to SEQ ID NO: 1144
  Synthetic polynucleotide

SEQ ID NO: 1146 - DNA, 196 bp, Artificial Sequence
  Synthetic polynucleotide
atcatctcaccttgcctcctgttgtcccatgagtcgtgcctgcagggattaattaatttagagattaattaattttcggattaattaatttgacgattaattaatttctagattaattaatttactgattaattaattttgcgattaattaatttgtagattaattaatttggcgcgccatgcttcatcagactct

SEQ ID NO: 1147 - DNA, 196 bp, Artificial Sequence; identical to SEQ ID NO: 1146
  Synthetic polynucleotide

SEQ ID NO: 1148 - DNA, 164 bp, Artificial Sequence
  Synthetic polynucleotide
atcatctcaccttgcctcctgtaggaccggagtatacacctgcaggtcagcatttagatcagcattttcgtcagcatttgactcagcatttctatcagcatttacttcagcattttgctcagcatttgtatcagcatttggcgcgccatgcttcatcagactct

SEQ ID NO: 1149 - DNA, 164 bp, Artificial Sequence; identical to SEQ ID NO: 1148
  Synthetic polynucleotide

SEQ ID NO: 1150 - DNA, 156 bp, Artificial Sequence
  Synthetic polynucleotide
atcatctcaccttgcctcctgatgagaggtgccttcaccctgcaggatgactcaagaatgactcatcgatgactcagacatgactcactaatgactcaactatgactcatgcatgactcagtaatgactcaggcgcgccatgcttcatcagactct

SEQ ID NO: 1151 - DNA, 156 bp, Artificial Sequence; identical to SEQ ID NO: 1150
  Synthetic polynucleotide

SEQ ID NO: 1152 - DNA, 190 bp, Artificial Sequence
  Synthetic polynucleotide
atcatctcaccttgcctcctgggtaggacttcagacaacctgcaggtaattatgcaatgtagataattatgcaatgttcgtaattatgcaatgtgactaattatgcaatgtctataattatgcaatgtacttaattatgcaatgttgctaattatgcaatgtgtaggcgcgccatgcttcatcagactct

SEQ ID NO: 1153 - DNA, 190 bp, Artificial Sequence; identical to SEQ ID NO: 1152
  Synthetic polynucleotide

SEQ ID NO: 1154 - DNA, 188 bp, Artificial Sequence
  Synthetic polynucleotide
atcatctcaccttgcctcctgctccaagtgaatcctcccctgcaggaacagatggtcgagaaacagatggtcgtcgaacagatggtcggacaacagatggtcgctaaacagatggtcgactaacagatggtcgtgcaacagatggtcggtaaacagatggtcgggcgcgccatgcttcatcagactct

SEQ ID NO: 1155 - DNA, 188 bp, Artificial Sequence; identical to SEQ ID NO: 1154
  Synthetic polynucleotide

SEQ ID NO: 1156 - DNA, 172 bp, Artificial Sequence
  Synthetic polynucleotide
atcatctcaccttgcctcctgccagatgtcgctagaatcctgcaggccccccccacagaccccccccactcgccccccccacgacccccccccacctaccccccccacactccccccccactgcccccccccacgtaccccccccacggcgcgccatgcttcatcagactct

SEQ ID NO: 1157 - DNA, 172 bp, Artificial Sequence; identical to SEQ ID NO: 1156
  Synthetic polynucleotide

SEQ ID NO: 1158 - DNA, 197 bp, Artificial Sequence
  Synthetic polynucleotide
atcatctcaccttgcctcctgcctaaaggtgagcgatacctgcaggccttggaaatcccctagaccttggaaatccccttcgccttggaaatcccctgacccttggaaatcccctctaccttggaaatcccctactccttggaaatccccttgcccttggaaatcccctgtaggcgcgccatgcttcatcagactct

SEQ ID NO: 1159 - DNA, 197 bp, Artificial Sequence; identical to SEQ ID NO: 1158
  Synthetic polynucleotide

SEQ ID NO: 1160 - DNA, 164 bp, Artificial Sequence
  Synthetic polynucleotide
atcatctcaccttgcctcctgctcttacacggaaagaccctgcagggatcacgtgagagatcacgtgtcggatcacgtggacgatcacgtgctagatcacgtgactgatcacgtgtgcgatcacgtggtagatcacgtgggcgcgccatgcttcatcagactct

SEQ ID NO: 1161 - DNA, 164 bp, Artificial Sequence; identical to SEQ ID NO: 1160
  Synthetic polynucleotide

SEQ ID NO: 1162 - DNA, 164 bp, Artificial Sequence
  Synthetic polynucleotide
atcatctcaccttgcctcctggatgcatgaacttgggacctgcagggtaaacaatagagtaaacaattcggtaaacaatgacgtaaacaatctagtaaacaatactgtaaacaattgcgtaaacaatgtagtaaacaatggcgcgccatgcttcatcagactct

SEQ ID NO: 1163 - DNA, 164 bp, Artificial Sequence; identical to SEQ ID NO: 1162
  Synthetic polynucleotide

SEQ ID NO: 1164 - DNA, 188 bp, Artificial Sequence
  Synthetic polynucleotide
atcatctcaccttgcctcctggggtgcgtcatacgagacctgcaggttatgttaacatagattatgttaacattcgttatgttaacatgacttatgttaacatctattatgttaacatactttatgttaacattgcttatgttaacatgtattatgttaacatggcgcgccatgcttcatcagactct

SEQ ID NO: 1165 - DNA, 188 bp, Artificial Sequence; identical to SEQ ID NO: 1164
  Synthetic polynucleotide

SEQ ID NO: 1166 - DNA, 188 bp, Artificial Sequence
  Synthetic polynucleotide
atcatctcaccttgcctcctgcatcgtgaagagaagaacctgcaggatggcggcatggagaatggcggcatggtcgatggcggcatgggacatggcggcatggctaatggcggcatggactatggcggcatggtgcatggcggcatgggtaatggcggcatggggcgcgccatgcttcatcagactct

SEQ ID NO: 1167 - DNA, 188 bp, Artificial Sequence; identical to SEQ ID NO: 1166
  Synthetic polynucleotide

SEQ ID NO: 1168 - DNA, 172 bp, Artificial Sequence
  Synthetic polynucleotide
atcatctcaccttgcctcctgtggtcacactggtaggccctgcaggtaggaacataagataggaacatatcgtaggaacatagactaggaacatactataggaacataacttaggaacatatgctaggaacatagtataggaacataggcgcgccatgcttcatcagactct

SEQ ID NO: 1169 - DNA, 172 bp, Artificial Sequence; identical to SEQ ID NO: 1168
  Synthetic polynucleotide

SEQ ID NO: 1170 - DNA, 196 bp, Artificial Sequence
  Synthetic polynucleotide
atcatctcaccttgcctcctggttaagactttcctcgacctgcaggtcgtaacaaagagagatcgtaacaaagagtcgtcgtaacaaagaggactcgtaacaaagagctatcgtaacaaagagacttcgtaacaaagagtgctcgtaacaaagaggtatcgtaacaaagagggcgcgccatgcttcatcagactct

SEQ ID NO: 1171 - DNA, 196 bp, Artificial Sequence; identical to SEQ ID NO: 1170
  Synthetic polynucleotide

SEQ ID NO: 1172 - DNA, 164 bp, Artificial Sequence
  Synthetic polynucleotide
atcatctcaccttgcctcctgaggataccgacttgtagcctgcagggtaaacaaaagagtaaacaaatcggtaaacaaagacgtaaacaaactagtaaacaaaactgtaaacaaatgcgtaaacaaagtagtaaacaaaggcgcgccatgcttcatcagactct

SEQ ID NO: 1173 - DNA, 164 bp, Artificial Sequence; identical to SEQ ID NO: 1172
  Synthetic polynucleotide

SEQ ID NO: 1174 - DNA, 191 bp, Artificial Sequence
  Synthetic polynucleotide
atcatctcaccttgcctcctgcagtttcggcgaagtgtcctgcaggtcaggggtcaaaggtcacccgagatcaggggtcaaaggtcacccgtcgtcaggggtcaaaggtcacccggactcaggggtcaaaggtcacccgctatcaggggtcaaaggtcacccgactggcgcgccatgcttcatcagactct

SEQ ID NO: 1175 - DNA, 191 bp, Artificial Sequence; identical to SEQ ID NO: 1174
  Synthetic polynucleotide

SEQ ID NO: 1176 - DNA, 164 bp, Artificial Sequence
  Synthetic polynucleotide
atcatctcaccttgcctcctgtgtggaccctactcaaacctgcagggtaaacaacagagtaaacaactcggtaaacaacgacgtaaacaacctagtaaacaacactgtaaacaactgcgtaaacaacgtagtaaacaacggcgcgccatgcttcatcagactct

SEQ ID NO: 1177 - DNA, 164 bp, Artificial Sequence; identical to SEQ ID NO: 1176
  Synthetic polynucleotide

SEQ ID NO: 1178 - DNA, 190 bp, Artificial Sequence
  Synthetic polynucleotide
atcatctcaccttgcctcctgccgtacatctttatgaccctgcaggtctcgcgagatttgagatctcgcgagatttgtcgtctcgcgagatttggactctcgcgagatttgctatctcgcgagatttgacttctcgcgagatttgtgctctcgcgagatttggtaggcgcgccatgcttcatcagactct

SEQ ID NO: 1179 - DNA, 190 bp, Artificial Sequence; identical to SEQ ID NO: 1178
  Synthetic polynucleotide

SEQ ID NO: 1180 - DNA, 185 bp, Artificial Sequence
  Synthetic polynucleotide
atcatctcaccttgcctcctgccattaaacgcgaatcgcctgcaggaaattaattggttttgagaaaattaattggttttgtcgaaattaattggttttggacaaattaattggttttgctaaaattaattggttttgactaaattaattggttttgtgcggcgcgccatgcttcatcagactct

SEQ ID NO: 1181 - DNA, 185 bp, Artificial Sequence; identical to SEQ ID NO: 1180
  Synthetic polynucleotide

SEQ ID NO: 1182 - DNA, 190 bp, Artificial Sequence
  Synthetic polynucleotide
atcatctcaccttgcctcctgctacaatatccagctaacctgcaggaaaccacgtggtttagaaaaccacgtggttttcgaaaccacgtggtttgacaaaccacgtggtttctaaaaccacgtggtttactaaaccacgtggttttgcaaaccacgtggtttgtaggcgcgccatgcttcatcagactct

SEQ ID NO: 1183 - DNA, 190 bp, Artificial Sequence; identical to SEQ ID NO: 1182
  Synthetic polynucleotide

SEQ ID NO: 1184 - DNA, 197 bp, Artificial Sequence
  Synthetic polynucleotide
atcatctcaccttgcctcctgtcgcacttgggagataccctgcaggcgtcacgcatgagtgctcagacgtcacgcatgagtgctctcgcgtcacgcatgagtgctcgaccgtcacgcatgagtgctcctacgtcacgcatgagtgctcactcgtcacgcatgagtgctctgcggcgcgccatgcttcatcagactct

SEQ ID NO: 1185 - DNA, 197 bp, Artificial Sequence; identical to SEQ ID NO: 1184
  Synthetic polynucleotide

SEQ ID NO: 1186 - DNA, 140 bp, Artificial Sequence
  Synthetic polynucleotide
atcatctcaccttgcctcctgcgctacggccctgtattcctgcaggtgccccagatgcccctcgtgccccgactgccccctatgccccacttgcccctgctgccccgtatgccccggcgcgccatgcttcatcagactct

SEQ ID NO: 1187 - DNA, 140 bp, Artificial Sequence; identical to SEQ ID NO: 1186
  Synthetic polynucleotide

SEQ ID NO: 1188 - DNA, 185 bp, Artificial Sequence
  Synthetic polynucleotide
atcatctcaccttgcctcctgacatccttcttggaacgcctgcaggaacactgcacattgttagaaacactgcacattgtttcgaacactgcacattgttgacaacactgcacattgttctaaacactgcacattgttactaacactgcacattgtttgcggcgcgccatgcttcatcagactct

SEQ ID NO: 1189 - DNA, 185 bp, Artificial Sequence; identical to SEQ ID NO: 1188
  Synthetic polynucleotide

SEQ ID NO: 1190 - DNA, 197 bp, Artificial Sequence
  Synthetic polynucleotide
atcatctcaccttgcctcctgtccaaggcagctggtctcctgcaggttggcaccgtgccaaagattggcaccgtgccaatcgttggcaccgtgccaagacttggcaccgtgccaactattggcaccgtgccaaactttggcaccgtgccaatgcttggcaccgtgccaagtaggcgcgccatgcttcatcagactct

SEQ ID NO: 1191 - DNA, 197 bp, Artificial Sequence; identical to SEQ ID NO: 1190
  Synthetic polynucleotide

SEQ ID NO: 1192 - DNA, 180 bp, Artificial Sequence
  Synthetic polynucleotide
atcatctcaccttgcctcctgagacgagtggttggctgcctgcaggtttttatggccagatttttatggcctcgtttttatggccgactttttatggccctatttttatggccacttttttatggcctgctttttatggccgtatttttatggccggcgcgccatgcttcatcagactct

SEQ ID NO: 1193 - DNA, 180 bp, Artificial Sequence; identical to SEQ ID NO: 1192
  Synthetic polynucleotide

SEQ ID NO: 1194 - DNA, 191 bp, Artificial Sequence
  Synthetic polynucleotide
atcatctcaccttgcctcctggaacacgttatacccggcctgcaggatcgatcagttatcgatagaatcgatcagttatcgattcgatcgatcagttatcgatgacatcgatcagttatcgatctaatcgatcagttatcgatactatcgatcagttatcgattgcggcgcgccatgcttcatcagactct

SEQ ID NO: 1195 - DNA, 191 bp, Artificial Sequence; identical to SEQ ID NO: 1194
  Synthetic polynucleotide

SEQ ID NO: 1196 - DNA, 185 bp, Artificial Sequence
  Synthetic polynucleotide
atcatctcaccttgcctcctgtagttcatcgactgtgtcctgcaggcccacggttactgccgagacccacggttactgccgtcgcccacggttactgccggaccccacggttactgccgctacccacggttactgccgactcccacggttactgccgtgcggcgcgccatgcttcatcagactct

SEQ ID NO: 1197 - DNA, 185 bp, Artificial Sequence; identical to SEQ ID NO: 1196
  Synthetic polynucleotide

SEQ ID NO: 1198 - DNA, 185 bp, Artificial Sequence
  Synthetic polynucleotide
atcatctcaccttgcctcctgcagtcgacctttacgatcctgcaggcggcgccccctggtggagacggcgccccctggtggtcgcggcgccccctggtgggaccggcgccccctggtggctacggcgccccctggtggactcggcgccccctggtggtgcggcgcgccatgcttcatcagactct

SEQ ID NO: 1199 - DNA, 185 bp, Artificial Sequence; identical to SEQ ID NO: 1198
  Synthetic polynucleotide

SEQ ID NO: 1200 - DNA, 172 bp, Artificial Sequence
  Synthetic polynucleotide
atcatctcaccttgcctcctgcttatcaggcatttctgcctgcaggttacgtaataagattacgtaatatcgttacgtaatagacttacgtaatactattacgtaataactttacgtaatatgcttacgtaatagtattacgtaataggcgcgccatgcttcatcagactct

SEQ ID NO: 1201 - DNA, 172 bp, Artificial Sequence; identical to SEQ ID NO: 1200
  Synthetic polynucleotide

SEQ ID NO: 1202 - DNA, 156 bp, Artificial Sequence
  Synthetic polynucleotide
atcatctcaccttgcctcctgtacacactaggatcctgcctgcaggcagatggcagacagatggctcgcagatggcgaccagatggcctacagatggcactcagatggctgccagatggcgtacagatggcggcgcgccatgcttcatcagactct

SEQ ID NO: 1203 - DNA, 156 bp, Artificial Sequence; identical to SEQ ID NO: 1202
  Synthetic polynucleotide

SEQ ID NO: 1204 - DNA, 148 bp, Artificial Sequence
  Synthetic polynucleotide
atcatctcaccttgcctcctgcaaggcacagagcgtaacctgcaggacttcctagaacttccttcgacttcctgacacttcctctaacttcctactacttccttgcacttcctgtaacttcctggcgcgccatgcttcatcagactct

SEQ ID NO: 1205 - DNA, 148 bp, Artificial Sequence; identical to SEQ ID NO: 1204
  Synthetic polynucleotide

SEQ ID NO: 1206 - DNA, 197 bp, Artificial Sequence
  Synthetic polynucleotide
atcatctcaccttgcctcctgaggtgcggtaataagcccctgcaggttgccttatttgggcatgagattgccttatttgggcatgtcgttgccttatttgggcatggacttgccttatttgggcatgctattgccttatttgggcatgactttgccttatttgggcatgtgcggcgcgccatgcttcatcagactct

SEQ ID NO: 1207 - DNA, 197 bp, Artificial Sequence; identical to SEQ ID NO: 1206
  Synthetic polynucleotide

SEQ ID NO: 1208 - DNA, 191 bp, Artificial Sequence
  Synthetic polynucleotide
atcatctcaccttgcctcctgatctaacgacccgttcccctgcaggtatatacatgtaaaattagatatatacatgtaaaatttcgtatatacatgtaaaattgactatatacatgtaaaattctatatatacatgtaaaattacttatatacatgtaaaatttgcggcgcgccatgcttcatcagactct

SEQ ID NO: 1209 - DNA, 191 bp, Artificial Sequence; identical to SEQ ID NO: 1208
  Synthetic polynucleotide

SEQ ID NO: 1210 - DNA, 197 bp, Artificial Sequence
  Synthetic polynucleotide
atcatctcaccttgcctcctgttgagcagattcgcccacctgcaggttaaccaatataaccaatagattaaccaatataaccaattcgttaaccaatataaccaatgacttaaccaatataaccaatctattaaccaatataaccaatactttaaccaatataaccaattgcggcgcgccatgcttcatcagactct

SEQ ID NO: 1211 - DNA, 197 bp, Artificial Sequence; identical to SEQ ID NO: 1210
  Synthetic polynucleotide

SEQ ID NO: 1212 - DNA, 172 bp, Artificial Sequence
  Synthetic polynucleotide
atcatctcaccttgcctcctgttaataccgggtcggtacctgcaggggtgacctctagaggtgacctcttcgggtgacctctgacggtgacctctctaggtgacctctactggtgacctcttgcggtgacctctgtaggtgacctctggcgcgccatgcttcatcagactct

SEQ ID NO: 1213 - DNA, 172 bp, Artificial Sequence; identical to SEQ ID NO: 1212
  Synthetic polynucleotide

SEQ ID NO: 1214 - DNA, 180 bp, Artificial Sequence
  Synthetic polynucleotide
atcatctcaccttgcctcctgttctaagttcaccagagcctgcagggtcacgtgatcagagtcacgtgatctcggtcacgtgatcgacgtcacgtgatcctagtcacgtgatcactgtcacgtgatctgcgtcacgtgatcgtagtcacgtgatcggcgcgccatgcttcatcagactct

SEQ ID NO: 1215 - DNA, 180 bp, Artificial Sequence; identical to SEQ ID NO: 1214
  Synthetic polynucleotide

SEQ ID NO: 1216 - DNA, 183 bp, Artificial Sequence
  Synthetic polynucleotide
atcatctcaccttgcctcctgacccttaacgagtagctcctgcagggcggggcattctgggaattgtagttagagcggggcattctgggaattgtagtttcggcggggcattctgggaattgtagttgacgcggggcattctgggaattgtagttctaggcgcgccatgcttcatcagactct

SEQ ID NO: 1217 - DNA, 183 bp, Artificial Sequence; identical to SEQ ID NO: 1216
  Synthetic polynucleotide

SEQ ID NO: 1218 - DNA, 172 bp, Artificial Sequence
  Synthetic polynucleotide
atcatctcaccttgcctcctggttcttggttaggttgccctgcaggattgcacaatagaattgcacaattcgattgcacaatgacattgcacaatctaattgcacaatactattgcacaattgcattgcacaatgtaattgcacaatggcgcgccatgcttcatcagactct

SEQ ID NO: 1219 - DNA, 172 bp, Artificial Sequence; identical to SEQ ID NO: 1218
  Synthetic polynucleotide

SEQ ID NO: 1220 - DNA, 180 bp, Artificial Sequence
  Synthetic polynucleotide
atcatctcaccttgcctcctgtagtaagcgtatcacctcctgcagggcgggcgctggagagcgggcgctggtcggcgggcgctgggacgcgggcgctggctagcgggcgctggactgcgggcgctggtgcgcgggcgctgggtagcgggcgctggggcgcgccatgcttcatcagactct

SEQ ID NO: 1221 - DNA, 180 bp, Artificial Sequence; identical to SEQ ID NO: 1220
  Synthetic polynucleotide

SEQ ID NO: 1222 - DNA, 197 bp, Artificial Sequence
  Synthetic polynucleotide
atcatctcaccttgcctcctgcccggtgagtgtctaatcctgcaggtagtgatcatcattaagatagtgatcatcattatcgtagtgatcatcattagactagtgatcatcattactatagtgatcatcattaacttagtgatcatcattatgctagtgatcatcattagtaggcgcgccatgcttcatcagactct

SEQ ID NO: 1223 - DNA, 197 bp, Artificial Sequence; identical to SEQ ID NO: 1222
  Synthetic polynucleotide

SEQ ID NO: 1224 - DNA, 190 bp, Artificial Sequence
  Synthetic polynucleotide
atcatctcaccttgcctcctgggcgcagcagttgatatcctgcagggttgccatggcaacagagttgccatggcaactcggttgccatggcaacgacgttgccatggcaacctagttgccatggcaacactgttgccatggcaactgcgttgccatggcaacgtaggcgcgccatgcttcatcagactct

SEQ ID NO: 1225 - DNA, 190 bp, Artificial Sequence; identical to SEQ ID NO: 1224
  Synthetic polynucleotide

SEQ ID NO: 1226 - DNA, 191 bp, Artificial Sequence
  Synthetic polynucleotide
atcatctcaccttgcctcctgcacatccttcagaatgccctgcagggacaattaatccctacaagagacaattaatccctacatcggacaattaatccctacagacgacaattaatccctacactagacaattaatccctacaactgacaattaatccctacatgcggcgcgccatgcttcatcagactct

SEQ ID NO: 1227 - DNA, 191 bp, Artificial Sequence; identical to SEQ ID NO: 1226
  Synthetic polynucleotide

SEQ ID NO: 1228 - DNA, 185 bp, Artificial Sequence
  Synthetic polynucleotide
atcatctcaccttgcctcctgtcaagattaccgtgaaacctgcaggaggggtcaagggttcaagaaggggtcaagggttcatcgaggggtcaagggttcagacaggggtcaagggttcactaaggggtcaagggttcaactaggggtcaagggttcatgcggcgcgccatgcttcatcagactct

SEQ ID NO: 1229 - DNA, 185 bp, Artificial Sequence; identical to SEQ ID NO: 1228
  Synthetic polynucleotide

SEQ ID NO: 1230 - DNA, 185 bp, Artificial Sequence
  Synthetic polynucleotide
atcatctcaccttgcctcctggaaacacacgtaataagcctgcaggaaaatggcgccattttagaaaaatggcgccatttttcgaaaatggcgccattttgacaaaatggcgccattttctaaaaatggcgccattttactaaaatggcgccatttttgcggcgcgccatgcttcatcagactct

SEQ ID NO: 1231 - DNA, 185 bp, Artificial Sequence; identical to SEQ ID NO: 1230
  Synthetic polynucleotide

SEQ ID NO: 1232 - DNA, 172 bp, Artificial Sequence
  Synthetic polynucleotide
atcatctcaccttgcctcctggaaactccaagtggtcacctgcaggtcatttccttagatcatttcctttcgtcatttccttgactcatttccttctatcatttccttacttcatttcctttgctcatttccttgtatcatttccttggcgcgccatgcttcatcagactct

SEQ ID NO: 1233 - DNA, 172 bp, Artificial Sequence; identical to SEQ ID NO: 1232
  Synthetic polynucleotide

SEQ ID NO: 1234 - DNA, 197 bp, Artificial Sequence
  Synthetic polynucleotide
atcatctcaccttgcctcctgggattaccctggtgtgtcctgcaggtggccaccagggggcgccagatggccaccagggggcgcctcgtggccaccagggggcgccgactggccaccagggggcgccctatggccaccagggggcgccacttggccaccagggggcgcctgcggcgcgccatgcttcatcagactct

SEQ ID NO: 1235 - DNA, 197 bp, Artificial Sequence; identical to SEQ ID NO: 1234
  Synthetic polynucleotide

SEQ ID NO: 1236 - DNA, 188 bp, Artificial Sequence
  Synthetic polynucleotide
atcatctcaccttgcctcctgcactacgatactctctgcctgcagggaggggggcggaagagaggggggcggatcggaggggggcggagacgaggggggcggactagaggggggcggaactgaggggggcggatgcgaggggggcggagtagaggggggcggaggcgcgccatgcttcatcagactct

SEQ ID NO: 1237 - DNA, 188 bp, Artificial Sequence; identical to SEQ ID NO: 1236
  Synthetic polynucleotide

SEQ ID NO: 1238 - DNA, 200 bp, Artificial Sequence
  Synthetic polynucleotide
atcatctcaccttgcctcctgaacgttccatctgctgtcctgcaggtggaggcgaccactaatggggaagttggcaagatggaggcgaccactaatggggaagttggcatcgtggaggcgaccactaatggggaagttggcagactggaggcgaccactaatggggaagttggcaggcgcgccatgcttcatcagactct

SEQ ID NO: 1239 - DNA, 200 bp, Artificial Sequence; identical to SEQ ID NO: 1238
  Synthetic polynucleotide

SEQ ID NO: 1240 - DNA, 172 bp, Artificial Sequence
  Synthetic polynucleotide
atcatctcaccttgcctcctgcgactgcgttccttctccctgcaggattgcacaacagaattgcacaactcgattgcacaacgacattgcacaacctaattgcacaacactattgcacaactgcattgcacaacgtaattgcacaacggcgcgccatgcttcatcagactct

SEQ ID NO: 1241 - DNA, 172 bp, Artificial Sequence; identical to SEQ ID NO: 1240
  Synthetic polynucleotide

SEQ ID NO: 1242 - DNA, 148 bp, Artificial Sequence
  Synthetic polynucleotide
atcatctcaccttgcctcctgtctccttagtatcatgtcctgcaggttaatgaagattaatgatcgttaatgagacttaatgactattaatgaactttaatgatgcttaatgagtattaatgaggcgcgccatgcttcatcagactct

SEQ ID NO: 1243 - DNA, 148 bp, Artificial Sequence; identical to SEQ ID NO: 1242
  Synthetic polynucleotide

SEQ ID NO: 1244 - DNA, 188 bp, Artificial Sequence
  Synthetic polynucleotide
atcatctcaccttgcctcctgtatggtaggaagcactccctgcaggaccgttaaacggagaaccgttaaacggtcgaccgttaaacgggacaccgttaaacggctaaccgttaaacggactaccgttaaacggtgcaccgttaaacgggtaaccgttaaacggggcgcgccatgcttcatcagactct

SEQ ID NO: 1245 - DNA, 188 bp, Artificial Sequence; identical to SEQ ID NO: 1244
  Synthetic polynucleotide

SEQ ID NO: 1246 - DNA, 197 bp, Artificial Sequence
  Synthetic polynucleotide
atcatctcaccttgcctcctggcagcagtgtccatgatcctgcaggaaaaaaaaaaaaaccagaaaaaaaaaaaaaacctcgaaaaaaaaaaaaaccgacaaaaaaaaaaaaaccctaaaaaaaaaaaaaaccactaaaaaaaaaaaaacctgcaaaaaaaaaaaaaccgtaggcgcgccatgcttcatcagactct

SEQ ID NO: 1247 - DNA, 197 bp, Artificial Sequence; identical to SEQ ID NO: 1246
  Synthetic polynucleotide

SEQ ID NO: 1248 - DNA, 185 bp, Artificial Sequence
  Synthetic polynucleotide
atcatctcaccttgcctcctgctttataatcatgaccccctgcaggggaataattacttcagagaggaataattacttcagtcgggaataattacttcaggacggaataattacttcagctaggaataattacttcagactggaataattacttcagtgcggcgcgccatgcttcatcagactct

SEQ ID NO: 1249 - DNA, 185 bp, Artificial Sequence; identical to SEQ ID NO: 1248
  Synthetic polynucleotide

SEQ ID NO: 1250 - DNA, 198 bp, Artificial Sequence
  Synthetic polynucleotide
atcatctcaccttgcctcctgctcctcctaacagtgctcctgcaggaagtaggtcacggtgacctacttagaaagtaggtcacggtgacctactttcgaagtaggtcacggtgacctacttgacaagtaggtcacggtgacctacttctaaagtaggtcacggtgacctacttggcgcgccatgcttcatcagactct

SEQ ID NO: 1251 - DNA, 198 bp, Artificial Sequence; identical to SEQ ID NO: 1250
  Synthetic polynucleotide

SEQ ID NO: 1252 - DNA, 164 bp, Artificial Sequence
  Synthetic polynucleotide
atcatctcaccttgcctcctgattgtggagatatctgacctgcagggcaataaaaagagcaataaaatcggcaataaaagacgcaataaaactagcaataaaaactgcaataaaatgcgcaataaaagtagcaataaaaggcgcgccatgcttcatcagactct

SEQ ID NO: 1253 - DNA, 164 bp, Artificial Sequence; identical to SEQ ID NO: 1252
  Synthetic polynucleotide

SEQ ID NO: 1254 - DNA, 197 bp, Artificial Sequence
  Synthetic polynucleotide
atcatctcaccttgcctcctgtaccgtcaatctgtagtcctgcaggtgacccggaagtggtagatgacccggaagtggttcgtgacccggaagtggtgactgacccggaagtggtctatgacccggaagtggtacttgacccggaagtggttgctgacccggaagtggtgtaggcgcgccatgcttcatcagactct

SEQ ID NO: 1255 - DNA, 197 bp, Artificial Sequence; identical to SEQ ID NO: 1254
  Synthetic polynucleotide

SEQ ID NO: 1256 - DNA, 172 bp, Artificial Sequence
  Synthetic polynucleotide
atcatctcaccttgcctcctgagtttaatcatgtcacccctgcagggccccacccaagagccccacccatcggccccacccagacgccccacccactagccccacccaactgccccacccatgcgccccacccagtagccccacccaggcgcgccatgcttcatcagactct

SEQ ID NO: 1257 - DNA, 172 bp, Artificial Sequence; identical to SEQ ID NO: 1256
  Synthetic polynucleotide

SEQ ID NO: 1258 - DNA, 196 bp, Artificial Sequence
  Synthetic polynucleotide
atcatctcaccttgcctcctgcgtagtcctcatcgctgcctgcaggacttgggaataccagaacttgggaatacctcgacttgggaataccgacacttgggaataccctaacttgggaataccactacttgggaatacctgcacttgggaataccgtaacttgggaataccggcgcgccatgcttcatcagactct

SEQ ID NO: 1259 - DNA, 196 bp, Artificial Sequence; identical to SEQ ID NO: 1258
  Synthetic polynucleotide

SEQ ID NO: 1260 - DNA, 172 bp, Artificial Sequence
  Synthetic polynucleotide
atcatctcaccttgcctcctgtctggcagtctctctgacctgcaggtccagctgctagatccagctgcttcgtccagctgctgactccagctgctctatccagctgctacttccagctgcttgctccagctgctgtatccagctgctggcgcgccatgcttcatcagactct

SEQ ID NO: 1261 - DNA, 172 bp, Artificial Sequence; identical to SEQ ID NO: 1260
  Synthetic polynucleotide

SEQ ID NO: 1262 - DNA, 196 bp, Artificial Sequence
  Synthetic polynucleotide
atcatctcaccttgcctcctgcgtaactgtgttagaggcctgcaggtgccccgggggcaagatgccccgggggcatcgtgccccgggggcagactgccccgggggcactatgccccgggggcaacttgccccgggggcatgctgccccgggggcagtatgccccgggggcaggcgcgccatgcttcatcagactct

SEQ ID NO: 1263 - DNA, 196 bp, Artificial Sequence; identical to SEQ ID NO: 1262
  Synthetic polynucleotide

SEQ ID NO: 1264 - DNA, 191 bp, Artificial Sequence
  Synthetic polynucleotide
atcatctcaccttgcctcctgaaagccctgagttgattcctgcaggtacattaattaacgctcagatacattaattaacgctctcgtacattaattaacgctcgactacattaattaacgctcctatacattaattaacgctcacttacattaattaacgctctgcggcgcgccatgcttcatcagactct

SEQ ID NO: 1265 - DNA, 191 bp, Artificial Sequence; identical to SEQ ID NO: 1264
  Synthetic polynucleotide

SEQ ID NO: 1266 - DNA, 190 bp, Artificial Sequence
  Synthetic polynucleotide
atcatctcaccttgcctcctggacaaacgagcagccgtcctgcaggactaaccaatcagaagaactaaccaatcagatcgactaaccaatcagagacactaaccaatcagactaactaaccaatcagaactactaaccaatcagatgcactaaccaatcagagtaggcgcgccatgcttcatcagactct

SEQ ID NO: 1267 - DNA, 190 bp, Artificial Sequence; identical to SEQ ID NO: 1266
  Synthetic polynucleotide

SEQ ID NO: 1268 - DNA, 191 bp, Artificial Sequence
  Synthetic polynucleotide
atcatctcaccttgcctcctgggtgtgatagctcaacacctgcaggacagcgccccctggtggccacagaacagcgccccctggtggccactcgacagcgccccctggtggccacgacacagcgccccctggtggccacctaacagcgccccctggtggccacactggcgcgccatgcttcatcagactct

SEQ ID NO: 1269 - DNA, 191 bp, Artificial Sequence; identical to SEQ ID NO: 1268
  Synthetic polynucleotide

SEQ ID NO: 1270 - DNA, 190 bp, Artificial Sequence
  Synthetic polynucleotide
atcatctcaccttgcctcctgctcgcattccaatgtagcctgcaggttggcatggtgccaagattggcatggtgccatcgttggcatggtgccagacttggcatggtgccactattggcatggtgccaactttggcatggtgccatgcttggcatggtgccagtaggcgcgccatgcttcatcagactct

SEQ ID NO: 1271 - DNA, 190 bp, Artificial Sequence; identical to SEQ ID NO: 1270
  Synthetic polynucleotide

SEQ ID NO: 1272 - DNA, 197 bp, Artificial Sequence
  Synthetic polynucleotide
atcatctcaccttgcctcctgcggtttatcggtcagatcctgcagggggggcaaaggtcacagagggggcaaaggtcactcggggggcaaaggtcacgacgggggcaaaggtcacctagggggcaaaggtcacactgggggcaaaggtcactgcgggggcaaaggtcacgtaggcgcgccatgcttcatcagactct

SEQ ID NO: 1273 - DNA, 197 bp, Artificial Sequence; identical to SEQ ID NO: 1272
  Synthetic polynucleotide

SEQ ID NO: 1274 - DNA, 191 bp, Artificial Sequence
  Synthetic polynucleotide
atcatctcaccttgcctcctgatttccgctacgggatccctgcaggtcgcatgaccttgaataagatcgcatgaccttgaatatcgtcgcatgaccttgaatagactcgcatgaccttgaatactatcgcatgaccttgaataacttcgcatgaccttgaatatgcggcgcgccatgcttcatcagactct

SEQ ID NO: 1275 - DNA, 191 bp, Artificial Sequence; identical to SEQ ID NO: 1274
  Synthetic polynucleotide

SEQ ID NO: 1276 - DNA, 180 bp, Artificial Sequence
  Synthetic polynucleotide
atcatctcaccttgcctcctgggacgtcaagacaatgacctgcaggagatgcttatcagaagatgcttatctcgagatgcttatcgacagatgcttatcctaagatgcttatcactagatgcttatctgcagatgcttatcgtaagatgcttatcggcgcgccatgcttcatcagactct

SEQ ID NO: 1277 - DNA, 180 bp, Artificial Sequence; identical to SEQ ID NO: 1276
  Synthetic polynucleotide

SEQ ID NO: 1278 - DNA, 180 bp, Artificial Sequence
  Synthetic polynucleotide
atcatctcaccttgcctcctgaacgggacatattactacctgcaggtttcccggaaaagatttcccggaaatcgtttcccggaaagactttcccggaaactatttcccggaaaacttttcccggaaatgctttcccggaaagtatttcccggaaaggcgcgccatgcttcatcagactct

SEQ ID NO: 1279 - DNA, 180 bp, Artificial Sequence; identical to SEQ ID NO: 1278
  Synthetic polynucleotide

SEQ ID NO: 1280 - DNA, 197 bp, Artificial Sequence
  Synthetic polynucleotide
atcatctcaccttgcctcctgggtacagatatccttaacctgcaggccctaagtaaacaaaagaccctaagtaaacaaatcgccctaagtaaacaaagacccctaagtaaacaaactaccctaagtaaacaaaactccctaagtaaacaaatgcccctaagtaaacaaagtaggcgcgccatgcttcatcagactct

SEQ ID NO: 1281 - DNA, 197 bp, Artificial Sequence; identical to SEQ ID NO: 1280
  Synthetic polynucleotide

SEQ ID NO: 1282 - DNA, 197 bp, Artificial Sequence
  Synthetic polynucleotide
atcatctcaccttgcctcctgtccaggagcattaagagcctgcaggttgcaaaacaaaggcagattgcaaaacaaaggctcgttgcaaaacaaaggcgacttgcaaaacaaaggcctattgcaaaacaaaggcactttgcaaaacaaaggctgcttgcaaaacaaaggcgtaggcgcgccatgcttcatcagactct

SEQ ID NO: 1283 - DNA, 197 bp, Artificial Sequence; identical to SEQ ID NO: 1282
  Synthetic polynucleotide

SEQ ID NO: 1284 - DNA, 156 bp, Artificial Sequence
  Synthetic polynucleotide
atcatctcaccttgcctcctgaatcaagtggatccgcgcctgcaggtcgcacttagatcgcactttcgtcgcacttgactcgcacttctatcgcacttacttcgcactttgctcgcacttgtatcgcacttggcgcgccatgcttcatcagactct

SEQ ID NO: 1285 - DNA, 156 bp, Artificial Sequence; identical to SEQ ID NO: 1284
  Synthetic polynucleotide

SEQ ID NO: 1286 - DNA, 197 bp, Artificial Sequence
  Synthetic polynucleotide
atcatctcaccttgcctcctgacacacaagtcctgcgccctgcaggtccaggtcaccctgacctagatccaggtcaccctgaccttcgtccaggtcaccctgacctgactccaggtcaccctgacctctatccaggtcaccctgacctacttccaggtcaccctgaccttgcggcgcgccatgcttcatcagactct

SEQ ID NO: 1287 - DNA, 197 bp, Artificial Sequence; identical to SEQ ID NO: 1286
  Synthetic polynucleotide

SEQ ID NO: 1288 - DNA, 156 bp, Artificial Sequence
  Synthetic polynucleotide
atcatctcaccttgcctcctgagtgctcaccatatgtccctgcaggtattgttaagatattgttatcgtattgttagactattgttactatattgttaacttattgttatgctattgttagtatattgttaggcgcgccatgcttcatcagactct

SEQ ID NO: 1289 - DNA, 156 bp, Artificial Sequence; identical to SEQ ID NO: 1288
  Synthetic polynucleotide

SEQ ID NO: 1290 - DNA, 180 bp, Artificial Sequence
  Synthetic polynucleotide
atcatctcaccttgcctcctggttaaatttacatgcgccctgcagggtgagttccagagagtgagttccagtcggtgagttccaggacgtgagttccagctagtgagttccagactgtgagttccagtgcgtgagttccaggtagtgagttccagggcgcgccatgcttcatcagactct

SEQ ID NO: 1291 - DNA, 180 bp, Artificial Sequence; identical to SEQ ID NO: 1290
  Synthetic polynucleotide

SEQ ID NO: 1292 - DNA, 156 bp, Artificial Sequence
  Synthetic polynucleotide
atcatctcaccttgcctcctggttactgggctacccgacctgcaggtattgttcagatattgttctcgtattgttcgactattgttcctatattgttcacttattgttctgctattgttcgtatattgttcggcgcgccatgcttcatcagactct

SEQ ID NO: 1293 - DNA, 156 bp, Artificial Sequence; identical to SEQ ID NO: 1292
  Synthetic polynucleotide

SEQ ID NO: 1294 - DNA, 196 bp, Artificial Sequence
  Synthetic polynucleotide
atcatctcaccttgcctcctgtaactcccggtagcagtcctgcaggggccgccatcttgagaggccgccatcttgtcgggccgccatcttggacggccgccatcttgctaggccgccatcttgactggccgccatcttgtgcggccgccatcttggtaggccgccatcttgggcgcgccatgcttcatcagactct

SEQ ID NO: 1295 - DNA, 196 bp, Artificial Sequence; identical to SEQ ID NO: 1294
  Synthetic polynucleotide

SEQ ID NO: 1296 - DNA, 148 bp, Artificial Sequence
  Synthetic polynucleotide
atcatctcaccttgcctcctggccctcacagttacatccctgcaggatataaaagaatataaatcgatataaagacatataaactaatataaaactatataaatgcatataaagtaatataaaggcgcgccatgcttcatcagactct

SEQ ID NO: 1297 - DNA, 148 bp, Artificial Sequence; identical to SEQ ID NO: 1296
  Synthetic polynucleotide

SEQ ID NO: 1298 - DNA, 197 bp, Artificial Sequence
  Synthetic polynucleotide
atcatctcaccttgcctcctggacatcgatgattacttcctgcaggggcaccagctgcgccagaggcaccagctgcgcctcgggcaccagctgcgccgacggcaccagctgcgccctaggcaccagctgcgccactggcaccagctgcgcctgcggcaccagctgcgccgtaggcgcgccatgcttcatcagactct

SEQ ID NO: 1299 - DNA, 197 bp, Artificial Sequence; identical to SEQ ID NO: 1298
  Synthetic polynucleotide

SEQ ID NO: 1300 - DNA, 197 bp, Artificial Sequence
  Synthetic polynucleotide
atcatctcaccttgcctcctgtcaatggctgggtaatccctgcaggcccccggctagcgtgagaagacccccggctagcgtgagatcgcccccggctagcgtgagagaccccccggctagcgtgagactacccccggctagcgtgagaactcccccggctagcgtgagatgcggcgcgccatgcttcatcagactct

SEQ ID NO: 1301 - DNA, 197 bp, Artificial Sequence; identical to SEQ ID NO: 1300
  Synthetic polynucleotide

SEQ ID NO: 1302 - DNA, 191 bp, Artificial Sequence
  Synthetic polynucleotide
atcatctcaccttgcctcctgacatgctgagtgccaggcctgcaggcaaatccagacatcagaagacaaatccagacatcagatcgcaaatccagacatcagagaccaaatccagacatcagactacaaatccagacatcagaactcaaatccagacatcagatgcggcgcgccatgcttcatcagactct

SEQ ID NO: 1303 - DNA, 191 bp, Artificial Sequence; identical to SEQ ID NO: 1302
  Synthetic polynucleotide

SEQ ID NO: 1304 - DNA, 200 bp, Artificial Sequence
  Synthetic polynucleotide
atcatctcaccttgcctcctgatagttgggctcctacccctgcagggaccacagatatccgtgttagagaccacagatatccgtgtttcggaccacagatatccgtgttgacgaccacagatatccgtgttctagaccacagatatccgtgttactgaccacagatatccgtgttggcgcgccatgcttcatcagactct

SEQ ID NO: 1305 - DNA, 200 bp, Artificial Sequence; identical to SEQ ID NO: 1304
  Synthetic polynucleotide

SEQ ID NO: 1306 - DNA, 197 bp, Artificial Sequence
  Synthetic polynucleotide
atcatctcaccttgcctcctgatcaactcgtaagacaacctgcaggtcaagtgaactttgtcctagatcaagtgaactttgtccttcgtcaagtgaactttgtcctgactcaagtgaactttgtcctctatcaagtgaactttgtcctacttcaagtgaactttgtccttgcggcgcgccatgcttcatcagactct

SEQ ID NO: 1307 - DNA, 197 bp, Artificial Sequence; identical to SEQ ID NO: 1306
  Synthetic polynucleotide

SEQ ID NO: 1308 - DNA, 197 bp, Artificial Sequence
  Synthetic polynucleotide
atcatctcaccttgcctcctggcatttgtacgactaggcctgcaggagtacttccgggtcaagaagtacttccgggtcatcgagtacttccgggtcagacagtacttccgggtcactaagtacttccgggtcaactagtacttccgggtcatgcagtacttccgggtcagtaggcgcgccatgcttcatcagactct

SEQ ID NO: 1309 - DNA, 197 bp, Artificial Sequence; identical to SEQ ID NO: 1308
  Synthetic polynucleotide

SEQ ID NO: 1310 - DNA, 172 bp, Artificial Sequence
  Synthetic polynucleotide
atcatctcaccttgcctcctggaccagtgcctcttgcacctgcaggaccagctgagagaaccagctgagtcgaccagctgaggacaccagctgagctaaccagctgagactaccagctgagtgcaccagctgaggtaaccagctgagggcgcgccatgcttcatcagactct

SEQ ID NO: 1311 - DNA, 172 bp, Artificial Sequence; identical to SEQ ID NO: 1310
  Synthetic polynucleotide

SEQ ID NO: 1312 - DNA, 191 bp, Artificial Sequence
  Synthetic polynucleotide
atcatctcaccttgcctcctgttactcatgatcctcaccctgcagggatgaatttcagtcatgagagatgaatttcagtcatgtcggatgaatttcagtcatggacgatgaatttcagtcatgctagatgaatttcagtcatgactgatgaatttcagtcatgtgcggcgcgccatgcttcatcagactct

SEQ ID NO: 1313 - DNA, 191 bp, Artificial Sequence; identical to SEQ ID NO: 1312
  Synthetic polynucleotide

SEQ ID NO: 1314 - DNA, 196 bp, Artificial Sequence
  Synthetic polynucleotide
atcatctcaccttgcctcctgtcgcgatccatgtcagtcctgcagggacttttctgggaagagacttttctgggatcggacttttctgggagacgacttttctgggactagacttttctgggaactgacttttctgggatgcgacttttctgggagtagacttttctgggaggcgcgccatgcttcatcagactct

SEQ ID NO: 1315 - DNA, 196 bp, Artificial Sequence; identical to SEQ ID NO: 1314
  Synthetic polynucleotide

SEQ ID NO: 1316 - DNA, 196 bp, Artificial Sequence
  Synthetic polynucleotide
atcatctcaccttgcctcctgagtggttggagccctttcctgcaggcataattgctgagtcattttagagacataattgctgagtcattttagtcgcataattgctgagtcattttaggaccataattgctgagtcattttagctacataattgctgagtcattttagactggcgcgccatgcttcatcagactct

SEQ ID NO: 1317 - DNA, 196 bp, Artificial Sequence; identical to SEQ ID NO: 1316
  Synthetic polynucleotide

SEQ ID NO: 1318 - DNA, 185 bp, Artificial Sequence
  Synthetic polynucleotide
atcatctcaccttgcctcctggaggtaatccgacgctccctgcaggacggtaattagctcatagaacggtaattagctcattcgacggtaattagctcatgacacggtaattagctcatctaacggtaattagctcatactacggtaattagctcattgcggcgcgccatgcttcatcagactct

SEQ ID NO: 1319 - DNA, 185 bp, Artificial Sequence; identical to SEQ ID NO: 1318
  Synthetic polynucleotide

SEQ ID NO: 1320 - DNA, 190 bp, Artificial Sequence
  Synthetic polynucleotide
atcatctcaccttgcctcctggtactacaacacgacaacctgcaggttttccatggaaaaagattttccatggaaaatcgttttccatggaaaagacttttccatggaaaactattttccatggaaaaactttttccatggaaaatgcttttccatggaaaagtaggcgcgccatgcttcatcagactct

SEQ ID NO: 1321 - DNA, 190 bp, Artificial Sequence; identical to SEQ ID NO: 1320
  Synthetic polynucleotide

SEQ ID NO: 1322 - DNA, 197 bp, Artificial Sequence
  Synthetic polynucleotide
atcatctcaccttgcctcctgcgtgggttcgtttcaagcctgcaggcccccaaccgccgttgggagacccccaaccgccgttgggtcgcccccaaccgccgttggggaccccccaaccgccgttgggctacccccaaccgccgttgggactcccccaaccgccgttgggtgcggcgcgccatgcttcatcagactct

SEQ ID NO: 1323 - DNA, 197 bp, Artificial Sequence; identical to SEQ ID NO: 1322
  Synthetic polynucleotide

SEQ ID NO: 1324 - DNA, 185 bp, Artificial Sequence
  Synthetic polynucleotide
atcatctcaccttgcctcctgctgttataagtcataggcctgcaggttacgcccacgcatttagattacgcccacgcattttcgttacgcccacgcatttgacttacgcccacgcatttctattacgcccacgcatttactttacgcccacgcattttgcggcgcgccatgcttcatcagactct

SEQ ID NO: 1325 - DNA, 185 bp, Artificial Sequence; identical to SEQ ID NO: 1324
  Synthetic polynucleotide

SEQ ID NO: 1326 - DNA, 197 bp, Artificial Sequence
  Synthetic polynucleotide
atcatctcaccttgcctcctgctgtaaacaaggtagtccctgcaggggtgtgaaatttcacaccagaggtgtgaaatttcacacctcgggtgtgaaatttcacaccgacggtgtgaaatttcacaccctaggtgtgaaatttcacaccactggtgtgaaatttcacacctgcggcgcgccatgcttcatcagactct

SEQ ID NO: 1327 - DNA, 197 bp, Artificial Sequence; identical to SEQ ID NO: 1326
  Synthetic polynucleotide

SEQ ID NO: 1328 - DNA, 185 bp, Artificial Sequence
  Synthetic polynucleotide
atcatctcaccttgcctcctgtctggcaaatcagtctccctgcaggaatgatgcgggtacgaagaaatgatgcgggtacgatcgaatgatgcgggtacgagacaatgatgcgggtacgactaaatgatgcgggtacgaactaatgatgcgggtacgatgcggcgcgccatgcttcatcagactct

SEQ ID NO: 1329 - DNA, 185 bp, Artificial Sequence; identical to SEQ ID NO: 1328
  Synthetic polynucleotide

SEQ ID NO: 1330 - DNA, 196 bp, Artificial Sequence
  Synthetic polynucleotide
atcatctcaccttgcctcctgtgggtgccatgatcgtgcctgcaggctatcgcgacataagactatcgcgacatatcgctatcgcgacatagacctatcgcgacatactactatcgcgacataactctatcgcgacatatgcctatcgcgacatagtactatcgcgacataggcgcgccatgcttcatcagactct

SEQ ID NO: 1331 - DNA, 196 bp, Artificial Sequence; identical to SEQ ID NO: 1330
  Synthetic polynucleotide

SEQ ID NO: 1332 - DNA, 185 bp, Artificial Sequence
  Synthetic polynucleotide
atcatctcaccttgcctcctgcggcaaagagggtttatcctgcaggccaccagggggcgccgagaccaccagggggcgccgtcgccaccagggggcgccggacccaccagggggcgccgctaccaccagggggcgccgactccaccagggggcgccgtgcggcgcgccatgcttcatcagactct

SEQ ID NO: 1333 - DNA, 185 bp, Artificial Sequence; identical to SEQ ID NO: 1332
  Synthetic polynucleotide

SEQ ID NO: 1334 - DNA, 156 bp, Artificial Sequence
  Synthetic polynucleotide
atcatctcaccttgcctcctgttgctccagcaccctatcctgcaggtacttaccagatacttacctcgtacttaccgactacttaccctatacttaccacttacttacctgctacttaccgtatacttaccggcgcgccatgcttcatcagactct

SEQ ID NO: 1335 - DNA, 156 bp, Artificial Sequence; identical to SEQ ID NO: 1334
  Synthetic polynucleotide

SEQ ID NO: 1336 - DNA, 164 bp, Artificial Sequence
  Synthetic polynucleotide
atcatctcaccttgcctcctgcaaacaaaggtgtgctccctgcaggttgcgtcatagattgcgtcattcgttgcgtcatgacttgcgtcatctattgcgtcatactttgcgtcattgcttgcgtcatgtattgcgtcatggcgcgccatgcttcatcagactct

SEQ ID NO: 1337 - DNA, 164 bp, Artificial Sequence; identical to SEQ ID NO: 1336
  Synthetic polynucleotide

SEQ ID NO: 1338 - DNA, 190 bp, Artificial Sequence
  Synthetic polynucleotide
atcatctcaccttgcctcctggcagaatcaactggatccctgcaggcctggaaatcccctagacctggaaatccccttcgcctggaaatcccctgaccctggaaatcccctctacctggaaatcccctactcctggaaatccccttgccctggaaatcccctgtaggcgcgccatgcttcatcagactct

SEQ ID NO: 1339 - DNA, 190 bp, Artificial Sequence; identical to SEQ ID NO: 1338
  Synthetic polynucleotide

SEQ ID NO: 1340 - DNA, 172 bp, Artificial Sequence
  Synthetic polynucleotide
atcatctcaccttgcctcctgttcagccttaggcgtaacctgcagggacgcgtgccagagacgcgtgcctcggacgcgtgccgacgacgcgtgccctagacgcgtgccactgacgcgtgcctgcgacgcgtgccgtagacgcgtgccggcgcgccatgcttcatcagactct

SEQ ID NO: 1341 - DNA, 172 bp, Artificial Sequence; identical to SEQ ID NO: 1340
  Synthetic polynucleotide

SEQ ID NO: 1342 - DNA, 185 bp, Artificial Sequence
  Synthetic polynucleotide
atcatctcaccttgcctcctgttcgcccggtaaactcacctgcaggacggtaattagctcagagaacggtaattagctcagtcgacggtaattagctcaggacacggtaattagctcagctaacggtaattagctcagactacggtaattagctcagtgcggcgcgccatgcttcatcagactct

SEQ ID NO: 1343 - DNA, 185 bp, Artificial Sequence; identical to SEQ ID NO: 1342
  Synthetic polynucleotide

SEQ ID NO: 1344 - DNA, 190 bp, Artificial Sequence
  Synthetic polynucleotide
atcatctcaccttgcctcctgaaagggcgaagccgtaacctgcaggtctgcacacggcccagatctgcacacggccctcgtctgcacacggcccgactctgcacacggcccctatctgcacacggcccacttctgcacacggccctgctctgcacacggcccgtaggcgcgccatgcttcatcagactct

SEQ ID NO: 1345 - DNA, 190 bp, Artificial Sequence; identical to SEQ ID NO: 1344
  Synthetic polynucleotide

SEQ ID NO: 1346 - DNA, 172 bp, Artificial Sequence
  Synthetic polynucleotide
atcatctcaccttgcctcctgtacttccgtactggcggcctgcaggcttaattagtagacttaattagttcgcttaattagtgaccttaattagtctacttaattagtactcttaattagttgccttaattagtgtacttaattagtggcgcgccatgcttcatcagactct

SEQ ID NO: 1347 - DNA, 172 bp, Artificial Sequence; identical to SEQ ID NO: 1346
  Synthetic polynucleotide

SEQ ID NO: 1348 - DNA, 200 bp, Artificial Sequence
  Synthetic polynucleotide
atcatctcaccttgcctcctgccaagacgcgtagctttcctgcaggagaggagaggagaagaggagggaggaagagagaagaggagaggagaagaggagggaggaagagtcgagaggagaggagaagaggagggaggaagaggacagaggagaggagaagaggagggaggaagagggcgcgccatgcttcatcagactct

SEQ ID NO: 1349 - DNA, 200 bp, Artificial Sequence; identical to SEQ ID NO: 1348
  Synthetic polynucleotide

SEQ ID NO: 1350 - DNA, 164 bp, Artificial Sequence
  Synthetic polynucleotide
atcatctcaccttgcctcctgggtgcgtgtaactatggcctgcaggtaggccacaagataggccacatcgtaggccacagactaggccacactataggccacaacttaggccacatgctaggccacagtataggccacaggcgcgccatgcttcatcagactct

SEQ ID NO: 1351 - DNA, 164 bp, Artificial Sequence; identical to SEQ ID NO: 1350
  Synthetic polynucleotide

SEQ ID NO: 1352 - DNA, 180 bp, Artificial Sequence
  Synthetic polynucleotide
atcatctcaccttgcctcctggcccgttactctagcctcctgcaggagccactcaagagaagccactcaagtcgagccactcaaggacagccactcaagctaagccactcaagactagccactcaagtgcagccactcaaggtaagccactcaagggcgcgccatgcttcatcagactct

SEQ ID NO: 1353 - DNA, 180 bp, Artificial Sequence; identical to SEQ ID NO: 1352
  Synthetic polynucleotide

SEQ ID NO: 1354 - DNA, 191 bp, Artificial Sequence
  Synthetic polynucleotide
atcatctcaccttgcctcctgccagagtatagttagtgcctgcaggtgcgctaattagtgggaagatgcgctaattagtgggatcgtgcgctaattagtgggagactgcgctaattagtgggactatgcgctaattagtgggaacttgcgctaattagtgggatgcggcgcgccatgcttcatcagactct

SEQ ID NO: 1355 - DNA, 191 bp, Artificial Sequence; identical to SEQ ID NO: 1354
  Synthetic polynucleotide

SEQ ID NO: 1356 - DNA, 156 bp, Artificial Sequence
  Synthetic polynucleotide
atcatctcaccttgcctcctgaggcaatactcgagcatcctgcaggttttattaagattttattatcgttttattagacttttattactattttattaactttttattatgcttttattagtattttattaggcgcgccatgcttcatcagactct

SEQ ID NO: 1357 - DNA, 156 bp, Artificial Sequence; identical to SEQ ID NO: 1356
  Synthetic polynucleotide

SEQ ID NO: 1358 - DNA, 196 bp, Artificial Sequence
  Synthetic polynucleotide
atcatctcaccttgcctcctgtaccctgacgtagccaacctgcaggggctctatcatctagaggctctatcatcttcgggctctatcatctgacggctctatcatctctaggctctatcatctactggctctatcatcttgcggctctatcatctgtaggctctatcatctggcgcgccatgcttcatcagactct

SEQ ID NO: 1359 - DNA, 196 bp, Artificial Sequence; identical to SEQ ID NO: 1358
  Synthetic polynucleotide

SEQ ID NO: 1360 - DNA, 172 bp, Artificial Sequence
  Synthetic polynucleotide
atcatctcaccttgcctcctgaacgaactcggcacgtccctgcaggaattgactttagaaattgacttttcgaattgactttgacaattgactttctaaattgactttactaattgacttttgcaattgactttgtaaattgactttggcgcgccatgcttcatcagactct

SEQ ID NO: 1361 - DNA, 172 bp, Artificial Sequence; identical to SEQ ID NO: 1360
  Synthetic polynucleotide

SEQ ID NO: 1362 - DNA, 197 bp, Artificial Sequence
  Synthetic polynucleotide
atcatctcaccttgcctcctggatagcggagtaacctgcctgcaggcccatcaatcaaattagacccatcaatcaaatttcgcccatcaatcaaattgaccccatcaatcaaattctacccatcaatcaaattactcccatcaatcaaatttgccccatcaatcaaattgtaggcgcgccatgcttcatcagactct

SEQ ID NO: 1363 - DNA, 197 bp, Artificial Sequence; identical to SEQ ID NO: 1362
  Synthetic polynucleotide

SEQ ID NO: 1364 - DNA, 185 bp, Artificial Sequence
  Synthetic polynucleotide
atcatctcaccttgcctcctgcttaggcgatttccttgcctgcaggcctttgttatgcaaatagacctttgttatgcaaattcgcctttgttatgcaaatgaccctttgttatgcaaatctacctttgttatgcaaatactcctttgttatgcaaattgcggcgcgccatgcttcatcagactct

SEQ ID NO: 1365 - DNA, 185 bp, Artificial Sequence; identical to SEQ ID NO: 1364
  Synthetic polynucleotide

SEQ ID NO: 1366 - DNA, 185 bp, Artificial Sequence
  Synthetic polynucleotide
atcatctcaccttgcctcctgccacggcaccagagattcctgcaggatattgacaggtgcttagaatattgacaggtgctttcgatattgacaggtgcttgacatattgacaggtgcttctaatattgacaggtgcttactatattgacaggtgctttgcggcgcgccatgcttcatcagactct

SEQ ID NO: 1367 - DNA, 185 bp, Artificial Sequence; identical to SEQ ID NO: 1366
  Synthetic polynucleotide

SEQ ID NO: 1368 - DNA, 191 bp, Artificial Sequence
  Synthetic polynucleotide
atcatctcaccttgcctcctgaacagctcacactatttcctgcagggtcgtgttgtgggaaagagagtcgtgttgtgggaaagtcggtcgtgttgtgggaaaggacgtcgtgttgtgggaaagctagtcgtgttgtgggaaagactgtcgtgttgtgggaaagtgcggcgcgccatgcttcatcagactct

SEQ ID NO: 1369 - DNA, 191 bp, Artificial Sequence; identical to SEQ ID NO: 1368
  Synthetic polynucleotide

SEQ ID NO: 1370 - DNA, 172 bp, Artificial Sequence
  Synthetic polynucleotide
atcatctcaccttgcctcctgtgtgtcacacttaattgcctgcaggcttaattagcagacttaattagctcgcttaattagcgaccttaattagcctacttaattagcactcttaattagctgccttaattagcgtacttaattagcggcgcgccatgcttcatcagactct

SEQ ID NO: 1371 - DNA, 172 bp, Artificial Sequence; identical to SEQ ID NO: 1370
  Synthetic polynucleotide

SEQ ID NO: 1372 - DNA, 197 bp, Artificial Sequence
  Synthetic polynucleotide
atcatctcaccttgcctcctgcaacagcgctgcattgacctgcaggtggccaccagggggcgctagatggccaccagggggcgcttcgtggccaccagggggcgctgactggccaccagggggcgctctatggccaccagggggcgctacttggccaccagggggcgcttgcggcgcgccatgcttcatcagactct

SEQ ID NO: 1373 - DNA, 197 bp, Artificial Sequence; identical to SEQ ID NO: 1372
  Synthetic polynucleotide

SEQ ID NO: 1374 - DNA, 190 bp, Artificial Sequence
  Synthetic polynucleotide
atcatctcaccttgcctcctgtcttgtttccgctgtcgcctgcaggtcataaaactgtcaagatcataaaactgtcatcgtcataaaactgtcagactcataaaactgtcactatcataaaactgtcaacttcataaaactgtcatgctcataaaactgtcagtaggcgcgccatgcttcatcagactct

SEQ ID NO: 1375 - DNA, 190 bp, Artificial Sequence; identical to SEQ ID NO: 1374
  Synthetic polynucleotide

SEQ ID NO: 1376 - DNA, 188 bp, Artificial Sequence
  Synthetic polynucleotide
atcatctcaccttgcctcctgttatatgtatccggagtcctgcaggggtcgtaaaattagaggtcgtaaaatttcgggtcgtaaaattgacggtcgtaaaattctaggtcgtaaaattactggtcgtaaaatttgcggtcgtaaaattgtaggtcgtaaaattggcgcgccatgcttcatcagactct

SEQ ID NO: 1377 - DNA, 188 bp, Artificial Sequence; identical to SEQ ID NO: 1376
  Synthetic polynucleotide

SEQ ID NO: 1378 - DNA, 172 bp, Artificial Sequence
  Synthetic polynucleotide
atcatctcaccttgcctcctggcggtttcccattgttacctgcaggggaaattcccagaggaaattccctcgggaaattcccgacggaaattcccctaggaaattcccactggaaattccctgcggaaattcccgtaggaaattcccggcgcgccatgcttcatcagactct

SEQ ID NO: 1379 - DNA, 172 bp, Artificial Sequence; identical to SEQ ID NO: 1378
  Synthetic polynucleotide

SEQ ID NO: 1380 - DNA, 197 bp, Artificial Sequence
  Synthetic polynucleotide
atcatctcaccttgcctcctgcgaatcctaccgctgtccctgcaggctgggaattgtagtcagactgggaattgtagtctcgctgggaattgtagtcgacctgggaattgtagtcctactgggaattgtagtcactctgggaattgtagtctgcctgggaattgtagtcgtaggcgcgccatgcttcatcagactct

SEQ ID NO: 1381 - DNA, 197 bp, Artificial Sequence; identical to SEQ ID NO: 1380
  Synthetic polynucleotide

SEQ ID NO: 1382 - DNA, 196 bp, Artificial Sequence
  Synthetic polynucleotide
atcatctcaccttgcctcctgatgttattcagcgtagacctgcagggcaggtgagggggagagcaggtgagggggtcggcaggtgaggggggacgcaggtgagggggctagcaggtgagggggactgcaggtgagggggtgcgcaggtgaggggggtagcaggtgagggggggcgcgccatgcttcatcagactct

SEQ ID NO: 1383 - DNA, 196 bp, Artificial Sequence; identical to SEQ ID NO: 1382
  Synthetic polynucleotide

SEQ ID NO: 1384 - DNA, 190 bp, Artificial Sequence
  Synthetic polynucleotide
atcatctcaccttgcctcctgtatattaccatgcccgtcctgcagggcacctgcctgtggagagcacctgcctgtggtcggcacctgcctgtgggacgcacctgcctgtggctagcacctgcctgtggactgcacctgcctgtggtgcgcacctgcctgtgggtaggcgcgccatgcttcatcagactct

SEQ ID NO: 1385 - DNA, 190 bp, Artificial Sequence; identical to SEQ ID NO: 1384
  Synthetic polynucleotide

SEQ ID NO: 1386 - DNA, 185 bp, Artificial Sequence
  Synthetic polynucleotide
atcatctcaccttgcctcctgttggatgtctcgctactcctgcaggtatacataaacaagatagatatacataaacaagattcgtatacataaacaagatgactatacataaacaagatctatatacataaacaagatacttatacataaacaagattgcggcgcgccatgcttcatcagactct

SEQ ID NO: 1387 - DNA, 185 bp, Artificial Sequence; identical to SEQ ID NO: 1386
  Synthetic polynucleotide

SEQ ID NO: 1388 - DNA, 180 bp, Artificial Sequence
  Synthetic polynucleotide
atcatctcaccttgcctcctggtcatgtacaagtgttacctgcaggtttccgggaaaagatttccgggaaatcgtttccgggaaagactttccgggaaactatttccgggaaaacttttccgggaaatgctttccgggaaagtatttccgggaaaggcgcgccatgcttcatcagactct

SEQ ID NO: 1389 - DNA, 180 bp, Artificial Sequence; identical to SEQ ID NO: 1388
  Synthetic polynucleotide

SEQ ID NO: 1390 - DNA, 197 bp, Artificial Sequence
  Synthetic polynucleotide
atcatctcaccttgcctcctgtcgtattgaggttgccacctgcaggaggtggctgccccacagaaggtggctgccccactcgaggtggctgccccacgacaggtggctgccccacctaaggtggctgccccacactaggtggctgccccactgcaggtggctgccccacgtaggcgcgccatgcttcatcagactct

SEQ ID NO: 1391 - DNA, 197 bp, Artificial Sequence; identical to SEQ ID NO: 1390
  Synthetic polynucleotide

SEQ ID NO: 1392 - DNA, 185 bp, Artificial Sequence
  Synthetic polynucleotide
atcatctcaccttgcctcctgtctctctctgagcaggccctgcaggaatcaattcaataattagaaatcaattcaataatttcgaatcaattcaataattgacaatcaattcaataattctaaatcaattcaataattactaatcaattcaataatttgcggcgcgccatgcttcatcagactct

SEQ ID NO: 1393 - DNA, 185 bp, Artificial Sequence; identical to SEQ ID NO: 1392
  Synthetic polynucleotide

SEQ ID NO: 1394 - DNA, 148 bp, Artificial Sequence
  Synthetic polynucleotide
atcatctcaccttgcctcctgagcccgtttctgtcagtcctgcaggacatcctagaacatccttcgacatcctgacacatcctctaacatcctactacatccttgcacatcctgtaacatcctggcgcgccatgcttcatcagactct

SEQ ID NO: 1395 - DNA, 148 bp, Artificial Sequence; identical to SEQ ID NO: 1394
  Synthetic polynucleotide

SEQ ID NO: 1396 - DNA, 191 bp, Artificial Sequence
  Synthetic polynucleotide
atcatctcaccttgcctcctgcttcgtgccatgggttgcctgcaggggggtcagtagaggtcaagaggggtcagtagaggtcatcgggggtcagtagaggtcagacggggtcagtagaggtcactaggggtcagtagaggtcaactggggtcagtagaggtcatgcggcgcgccatgcttcatcagactct

SEQ ID NO: 1397 - DNA, 191 bp, Artificial Sequence; identical to SEQ ID NO: 1396
  Synthetic polynucleotide

SEQ ID NO: 1398 - DNA, 191 bp, Artificial Sequence
  Synthetic polynucleotide
atcatctcaccttgcctcctgaacgtcccaagagtgttcctgcaggggtaattaattaatgcgagaggtaattaattaatgcgtcgggtaattaattaatgcggacggtaattaattaatgcgctaggtaattaattaatgcgactggtaattaattaatgcgtgcggcgcgccatgcttcatcagactct

SEQ ID NO: 1399 - DNA, 191 bp, Artificial Sequence; identical to SEQ ID NO: 1398
  Synthetic polynucleotide

SEQ ID NO: 1400 - DNA, 156 bp, Artificial Sequence
  Synthetic polynucleotide
atcatctcaccttgcctcctgtcagtagggctaacgctcctgcagggacacgtgagagacacgtgtcggacacgtggacgacacgtgctagacacgtgactgacacgtgtgcgacacgtggtagacacgtgggcgcgccatgcttcatcagactct

SEQ ID NO: 1401 - DNA, 156 bp, Artificial Sequence; identical to SEQ ID NO: 1400
  Synthetic polynucleotide

SEQ ID NO: 1402 - DNA, 148 bp, Artificial Sequence
  Synthetic polynucleotide
atcatctcaccttgcctcctggatatcaaggtctcccacctgcaggtttatgaagatttatgatcgtttatgagactttatgactatttatgaacttttatgatgctttatgagtatttatgaggcgcgccatgcttcatcagactct

SEQ ID NO: 1403 - DNA, 148 bp, Artificial Sequence; identical to SEQ ID NO: 1402
  Synthetic polynucleotide

SEQ ID NO: 1404 - DNA, 196 bp, Artificial Sequence
  Synthetic polynucleotide
atcatctcaccttgcctcctgctaccatcctcatacatcctgcaggctgctgagtcatgagactgctgagtcatgtcgctgctgagtcatggacctgctgagtcatgctactgctgagtcatgactctgctgagtcatgtgcctgctgagtcatggtactgctgagtcatgggcgcgccatgcttcatcagactct

SEQ ID NO: 1405 - DNA, 196 bp, Artificial Sequence; identical to SEQ ID NO: 1404
  Synthetic polynucleotide

SEQ ID NO: 1406 - DNA, 148 bp, Artificial Sequence
  Synthetic polynucleotide
atcatctcaccttgcctcctgaaggcgcgagttgtattcctgcaggttaatccagattaatcctcgttaatccgacttaatccctattaatccactttaatcctgcttaatccgtattaatccggcgcgccatgcttcatcagactct

SEQ ID NO: 1407 - DNA, 148 bp, Artificial Sequence; identical to SEQ ID NO: 1406
  Synthetic polynucleotide

SEQ ID NO: 1408 - DNA, 164 bp, Artificial Sequence
  Synthetic polynucleotide
atcatctcaccttgcctcctgcttaggaaaccaaatcgcctgcaggccacttgagagaccacttgagtcgccacttgaggacccacttgagctaccacttgagactccacttgagtgcccacttgaggtaccacttgagggcgcgccatgcttcatcagactct

SEQ ID NO: 1409 - DNA, 164 bp, Artificial Sequence; identical to SEQ ID NO: 1408
  Synthetic polynucleotide

SEQ ID NO: 1410 - DNA, 185 bp, Artificial Sequence
  Synthetic polynucleotide
atcatctcaccttgcctcctgtctacacttacgagcagcctgcaggctttgctactgtacatagactttgctactgtacattcgctttgctactgtacatgacctttgctactgtacatctactttgctactgtacatactctttgctactgtacattgcggcgcgccatgcttcatcagactct

SEQ ID NO: 1411 - DNA, 185 bp, Artificial Sequence; identical to SEQ ID NO: 1410
  Synthetic polynucleotide

SEQ ID NO: 1412 - DNA, 180 bp, Artificial Sequence
  Synthetic polynucleotide
atcatctcaccttgcctcctgacctctagaaacgcgcgcctgcaggtgcataaattaagatgcataaattatcgtgcataaattagactgcataaattactatgcataaattaacttgcataaattatgctgcataaattagtatgcataaattaggcgcgccatgcttcatcagactct

SEQ ID NO: 1413 - DNA, 180 bp, Artificial Sequence; identical to SEQ ID NO: 1412
  Synthetic polynucleotide

SEQ ID NO: 1414 - DNA, 196 bp, Artificial Sequence
  Synthetic polynucleotide
atcatctcaccttgcctcctgagaaactccacaactaccctgcaggatatgcaaatgagagaatatgcaaatgagtcgatatgcaaatgaggacatatgcaaatgagctaatatgcaaatgagactatatgcaaatgagtgcatatgcaaatgaggtaatatgcaaatgagggcgcgccatgcttcatcagactct

SEQ ID NO: 1415 - DNA, 196 bp, Artificial Sequence; identical to SEQ ID NO: 1414
  Synthetic polynucleotide

SEQ ID NO: 1416 - DNA, 191 bp, Artificial Sequence
  Synthetic polynucleotide
atcatctcaccttgcctcctgtagtgtccattgcctatcctgcaggtcctttgttatgcaaatagatcctttgttatgcaaattcgtcctttgttatgcaaatgactcctttgttatgcaaatctatcctttgttatgcaaatacttcctttgttatgcaaattgcggcgcgccatgcttcatcagactct

SEQ ID NO: 1417 - DNA, 191 bp, Artificial Sequence; identical to SEQ ID NO: 1416
  Synthetic polynucleotide

SEQ ID NO: 1418 - DNA, 156 bp, Artificial Sequence
  Synthetic polynucleotide
atcatctcaccttgcctcctgcctagaggctctaatcccctgcagggattaattagagattaatttcggattaattgacgattaattctagattaattactgattaatttgcgattaattgtagattaattggcgcgccatgcttcatcagactct

SEQ ID NO: 1419 - DNA, 156 bp, Artificial Sequence; identical to SEQ ID NO: 1418
  Synthetic polynucleotide

SEQ ID NO: 1420 - DNA, 196 bp, Artificial Sequence
  Synthetic polynucleotide
atcatctcaccttgcctcctgtagcattgttaagccgtcctgcaggatatgcaaatgaaagaatatgcaaatgaatcgatatgcaaatgaagacatatgcaaatgaactaatatgcaaatgaaactatatgcaaatgaatgcatatgcaaatgaagtaatatgcaaatgaaggcgcgccatgcttcatcagactct

SEQ ID NO: 1421 - DNA, 196 bp, Artificial Sequence; identical to SEQ ID NO: 1420
  Synthetic polynucleotide

SEQ ID NO: 1422 - DNA, 164 bp, Artificial Sequence
  Synthetic polynucleotide
atcatctcaccttgcctcctgagctttcggacgcggatcctgcaggccacttgaaagaccacttgaatcgccacttgaagacccacttgaactaccacttgaaactccacttgaatgcccacttgaagtaccacttgaaggcgcgccatgcttcatcagactct

SEQ ID NO: 1423 - DNA, 164 bp, Artificial Sequence; identical to SEQ ID NO: 1422
  Synthetic polynucleotide

SEQ ID NO: 1424 - DNA, 132 bp, Artificial Sequence
  Synthetic polynucleotide
atcatctcaccttgcctcctgctaaatcccacggctgccctgcaggaaacaagaaaacatcgaaacagacaaacactaaaacaactaaacatgcaaacagtaaaacaggcgcgccatgcttcatcagactct

SEQ ID NO: 1425 - DNA, 132 bp, Artificial Sequence; identical to SEQ ID NO: 1424
  Synthetic polynucleotide

SEQ ID NO: 1426 - DNA, 191 bp, Artificial Sequence
  Synthetic polynucleotide
atcatctcaccttgcctcctgcgtctccttcccatcgtcctgcaggtgacctttgcatgacctagatgacctttgcatgaccttcgtgacctttgcatgacctgactgacctttgcatgacctctatgacctttgcatgacctacttgacctttgcatgaccttgcggcgcgccatgcttcatcagactct

SEQ ID NO: 1427 - DNA, 191 bp, Artificial Sequence; identical to SEQ ID NO: 1426
  Synthetic polynucleotide

SEQ ID NO: 1428 - DNA, 191 bp, Artificial Sequence
  Synthetic polynucleotide
atcatctcaccttgcctcctgtccacacatccactggacctgcaggataaacaagtgtaaacaagaataaacaagtgtaaacatcgataaacaagtgtaaacagacataaacaagtgtaaacactaataaacaagtgtaaacaactataaacaagtgtaaacatgcggcgcgccatgcttcatcagactct

SEQ ID NO: 1429 - DNA, 191 bp, Artificial Sequence; identical to SEQ ID NO: 1428
  Synthetic polynucleotide

SEQ ID NO: 1430 - DNA, 190 bp, Artificial Sequence
  Synthetic polynucleotide
atcatctcaccttgcctcctggacaatacttcgccgtgcctgcaggaacgtaaacaacacagaaacgtaaacaacactcgaacgtaaacaacacgacaacgtaaacaacacctaaacgtaaacaacacactaacgtaaacaacactgcaacgtaaacaacacgtaggcgcgccatgcttcatcagactct

SEQ ID NO: 1431 - DNA, 190 bp, Artificial Sequence; identical to SEQ ID NO: 1430
  Synthetic polynucleotide

SEQ ID NO: 1432 - DNA, 156 bp, Artificial Sequence
  Synthetic polynucleotide
atcatctcaccttgcctcctgcttctatccaaggagggcctgcaggctggtggcagactggtggctcgctggtggcgacctggtggcctactggtggcactctggtggctgcctggtggcgtactggtggcggcgcgccatgcttcatcagactct

SEQ ID NO: 1433 - DNA, 156 bp, Artificial Sequence; identical to SEQ ID NO: 1432
  Synthetic polynucleotide

SEQ ID NO: 1434 - DNA, 172 bp, Artificial Sequence
  Synthetic polynucleotide
atcatctcaccttgcctcctgtagccgcagtttattcccctgcaggtgagtcatcaagatgagtcatcatcgtgagtcatcagactgagtcatcactatgagtcatcaacttgagtcatcatgctgagtcatcagtatgagtcatcaggcgcgccatgcttcatcagactct

SEQ ID NO: 1435 - DNA, 172 bp, Artificial Sequence; identical to SEQ ID NO: 1434
  Synthetic polynucleotide

SEQ ID NO: 1436 - DNA, 185 bp, Artificial Sequence
  Synthetic polynucleotide
atcatctcaccttgcctcctgagtctctcagaaggctccctgcaggaaaaataaatataaggagaaaaaataaatataaggtcgaaaaataaatataagggacaaaaataaatataaggctaaaaaataaatataaggactaaaaataaatataaggtgcggcgcgccatgcttcatcagactct

SEQ ID NO: 1437 - DNA, 185 bp, Artificial Sequence; identical to SEQ ID NO: 1436
  Synthetic polynucleotide

SEQ ID NO: 1438 - DNA, 197 bp, Artificial Sequence
  Synthetic polynucleotide
atcatctcaccttgcctcctgttagacccgaatctgagcctgcaggggcggcgccggctgcagaggcggcgccggctgctcgggcggcgccggctgcgacggcggcgccggctgcctaggcggcgccggctgcactggcggcgccggctgctgcggcggcgccggctgcgtaggcgcgccatgcttcatcagactct

SEQ ID NO: 1439 - DNA, 197 bp, Artificial Sequence; identical to SEQ ID NO: 1438
  Synthetic polynucleotide

SEQ ID NO: 1440 - DNA, 180 bp, Artificial Sequence
  Synthetic polynucleotide
atcatctcaccttgcctcctgacaagatctagcacgctcctgcaggggaaccacgtgagaggaaccacgtgtcgggaaccacgtggacggaaccacgtgctaggaaccacgtgactggaaccacgtgtgcggaaccacgtggtaggaaccacgtgggcgcgccatgcttcatcagactct

SEQ ID NO: 1441 - DNA, 180 bp, Artificial Sequence; identical to SEQ ID NO: 1440
  Synthetic polynucleotide

SEQ ID NO: 1442 - DNA, 197 bp, Artificial Sequence
  Synthetic polynucleotide
atcatctcaccttgcctcctgagcggacagacgatacacctgcaggataagggcgcgcgatagaataagggcgcgcgattcgataagggcgcgcgatgacataagggcgcgcgatctaataagggcgcgcgatactataagggcgcgcgattgcataagggcgcgcgatgtaggcgcgccatgcttcatcagactct

SEQ ID NO: 1443 - DNA, 197 bp, Artificial Sequence; identical to SEQ ID NO: 1442
  Synthetic polynucleotide

SEQ ID NO: 1444 - DNA, 185 bp, Artificial Sequence
  Synthetic polynucleotide
atcatctcaccttgcctcctggtgcgtagtaaacgcgccctgcaggtggcgtgacctcaatcagatggcgtgacctcaatctcgtggcgtgacctcaatcgactggcgtgacctcaatcctatggcgtgacctcaatcacttggcgtgacctcaatctgcggcgcgccatgcttcatcagactct

SEQ ID NO: 1445 - DNA, 185 bp, Artificial Sequence; identical to SEQ ID NO: 1444
  Synthetic polynucleotide

SEQ ID NO: 1446 - DNA, 180 bp, Artificial Sequence
  Synthetic polynucleotide
atcatctcaccttgcctcctgggaaggccctttagtatcctgcaggagccacgtggtagaagccacgtggttcgagccacgtggtgacagccacgtggtctaagccacgtggtactagccacgtggttgcagccacgtggtgtaagccacgtggtggcgcgccatgcttcatcagactct

SEQ ID NO: 1447 - DNA, 180 bp, Artificial Sequence; identical to SEQ ID NO: 1446
  Synthetic polynucleotide

SEQ ID NO: 1448 - DNA, 196 bp, Artificial Sequence
  Synthetic polynucleotide
atcatctcaccttgcctcctgttacacaccagaggctgcctgcagggaaacacagtagcagagaaacacagtagctcggaaacacagtagcgacgaaacacagtagcctagaaacacagtagcactgaaacacagtagctgcgaaacacagtagcgtagaaacacagtagcggcgcgccatgcttcatcagactct

SEQ ID NO: 1449 - DNA, 196 bp, Artificial Sequence; identical to SEQ ID NO: 1448
  Synthetic polynucleotide

SEQ ID NO: 1450 - DNA, 191 bp, Artificial Sequence
  Synthetic polynucleotide
atcatctcaccttgcctcctgttaatttcaggcgtgcccctgcaggaatatacatgtaaaacaagaaatatacatgtaaaacatcgaatatacatgtaaaacagacaatatacatgtaaaacactaaatatacatgtaaaacaactaatatacatgtaaaacatgcggcgcgccatgcttcatcagactct

SEQ ID NO: 1451 - DNA, 191 bp, Artificial Sequence; identical to SEQ ID NO: 1450
  Synthetic polynucleotide

SEQ ID NO: 1452 - DNA, 185 bp, Artificial Sequence
  Synthetic polynucleotide
atcatctcaccttgcctcctgcacgtattcatgattggcctgcaggagtaattaattacttcagaagtaattaattacttctcgagtaattaattacttcgacagtaattaattacttcctaagtaattaattacttcactagtaattaattacttctgcggcgcgccatgcttcatcagactct

SEQ ID NO: 1453 - DNA, 185 bp, Artificial Sequence; identical to SEQ ID NO: 1452
  Synthetic polynucleotide

SEQ ID NO: 1454 - DNA, 164 bp, Artificial Sequence
  Synthetic polynucleotide
atcatctcaccttgcctcctgtctcgtagctcatcacgcctgcaggtgtttgtttagatgtttgttttcgtgtttgtttgactgtttgtttctatgtttgtttacttgtttgttttgctgtttgtttgtatgtttgtttggcgcgccatgcttcatcagactct

SEQ ID NO: 1455 - DNA, 164 bp, Artificial Sequence; identical to SEQ ID NO: 1454
  Synthetic polynucleotide

SEQ ID NO: 1456 - DNA, 185 bp, Artificial Sequence
  Synthetic polynucleotide
atcatctcaccttgcctcctgcggaggcgtgaatattccctgcagggggtcacgtgaccgcgagagggtcacgtgaccgcgtcggggtcacgtgaccgcggacgggtcacgtgaccgcgctagggtcacgtgaccgcgactgggtcacgtgaccgcgtgcggcgcgccatgcttcatcagactct

SEQ ID NO: 1457 - DNA, 185 bp, Artificial Sequence; identical to SEQ ID NO: 1456
  Synthetic polynucleotide

SEQ ID NO: 1458 - DNA, 188 bp, Artificial Sequence
  Synthetic polynucleotide
atcatctcaccttgcctcctggcttcccttggccgatacctgcaggcccaggaagtgcagacccaggaagtgctcgcccaggaagtgcgaccccaggaagtgcctacccaggaagtgcactcccaggaagtgctgccccaggaagtgcgtacccaggaagtgcggcgcgccatgcttcatcagactct

SEQ ID NO: 1459 - DNA, 188 bp, Artificial Sequence; identical to SEQ ID NO: 1458
  Synthetic polynucleotide

SEQ ID NO: 1460 - DNA, 185 bp, Artificial Sequence
  Synthetic polynucleotide
atcatctcaccttgcctcctggaaagtctcaacggctacctgcaggttgaccttttgaccttagattgaccttttgacctttcgttgaccttttgaccttgacttgaccttttgaccttctattgaccttttgaccttactttgaccttttgacctttgcggcgcgccatgcttcatcagactct

SEQ ID NO: 1461 - DNA, 185 bp, Artificial Sequence; identical to SEQ ID NO: 1460
  Synthetic polynucleotide

SEQ ID NO: 1462 - DNA, 180 bp, Artificial Sequence
  Synthetic polynucleotide
atcatctcaccttgcctcctgtacccagtttgcgtatacctgcaggaccaattaaaaagaaccaattaaaatcgaccaattaaaagacaccaattaaaactaaccaattaaaaactaccaattaaaatgcaccaattaaaagtaaccaattaaaaggcgcgccatgcttcatcagactct

SEQ ID NO: 1463 - DNA, 180 bp, Artificial Sequence; identical to SEQ ID NO: 1462
  Synthetic polynucleotide

SEQ ID NO: 1464 - DNA, 191 bp, Artificial Sequence
  Synthetic polynucleotide
atcatctcaccttgcctcctggtgttcaatggcccgaccctgcaggatttcccatcatgccttgcgaagaatttcccatcatgccttgcgatcgatttcccatcatgccttgcgagacatttcccatcatgccttgcgactaatttcccatcatgccttgcgaactggcgcgccatgcttcatcagactct

SEQ ID NO: 1465 - DNA, 191 bp, Artificial Sequence; identical to SEQ ID NO: 1464
  Synthetic polynucleotide

SEQ ID NO: 1466 - DNA, 191 bp, Artificial Sequence
  Synthetic polynucleotide
atcatctcaccttgcctcctgtgataacgttggcatttcctgcaggcgcgctaattaggtatcagacgcgctaattaggtatctcgcgcgctaattaggtatcgaccgcgctaattaggtatcctacgcgctaattaggtatcactcgcgctaattaggtatctgcggcgcgccatgcttcatcagactct

SEQ ID NO: 1467 - DNA, 191 bp, Artificial Sequence; identical to SEQ ID NO: 1466
  Synthetic polynucleotide

SEQ ID NO: 1468 - DNA, 197 bp, Artificial Sequence
  Synthetic polynucleotide
atcatctcaccttgcctcctgctccggaaggacattgccctgcaggctttgtttacttttgagactttgtttacttttgtcgctttgtttacttttggacctttgtttacttttgctactttgtttacttttgactctttgtttacttttgtgcctttgtttacttttggtaggcgcgccatgcttcatcagactct

SEQ ID NO: 1469 - DNA, 197 bp, Artificial Sequence; identical to SEQ ID NO: 1468
  Synthetic polynucleotide

SEQ ID NO: 1470 - DNA, 185 bp, Artificial Sequence
  Synthetic polynucleotide
atcatctcaccttgcctcctgagtaatgagatcggccgcctgcaggttgaccttttgacctcagattgaccttttgacctctcgttgaccttttgacctcgacttgaccttttgacctcctattgaccttttgacctcactttgaccttttgacctctgcggcgcgccatgcttcatcagactct

SEQ ID NO: 1471 - DNA, 185 bp, Artificial Sequence; identical to SEQ ID NO: 1470
  Synthetic polynucleotide

SEQ ID NO: 1472 - DNA, 172 bp, Artificial Sequence
  Synthetic polynucleotide
atcatctcaccttgcctcctgttgccgggatttccacacctgcaggaaagcaaacaagaaaagcaaacatcgaaagcaaacagacaaagcaaacactaaaagcaaacaactaaagcaaacatgcaaagcaaacagtaaaagcaaacaggcgcgccatgcttcatcagactct

SEQ ID NO: 1473 - DNA, 172 bp, Artificial Sequence; identical to SEQ ID NO: 1472
  Synthetic polynucleotide

SEQ ID NO: 1474 - DNA, 191 bp, Artificial Sequence
  Synthetic polynucleotide
atcatctcaccttgcctcctgttcagtggtagaccgtccctgcagggtgatctagaaccttagagagtgatctagaaccttagtcggtgatctagaaccttaggacgtgatctagaaccttagctagtgatctagaaccttagactgtgatctagaaccttagtgcggcgcgccatgcttcatcagactct

SEQ ID NO: 1475 - DNA, 191 bp, Artificial Sequence; identical to SEQ ID NO: 1474
  Synthetic polynucleotide

SEQ ID NO: 1476 - DNA, 188 bp, Artificial Sequence
  Synthetic polynucleotide
atcatctcaccttgcctcctgaacttacccgctgactccctgcaggctacatgacaaaagactacatgacaaatcgctacatgacaaagacctacatgacaaactactacatgacaaaactctacatgacaaatgcctacatgacaaagtactacatgacaaaggcgcgccatgcttcatcagactct

SEQ ID NO: 1477 - DNA, 188 bp, Artificial Sequence; identical to SEQ ID NO: 1476
  Synthetic polynucleotide

SEQ ID NO: 1478 - DNA, 197 bp, Artificial Sequence
  Synthetic polynucleotide
atcatctcaccttgcctcctgacttgtaggcaaacccgcctgcaggttgctgagtcagcaaagattgctgagtcagcaatcgttgctgagtcagcaagacttgctgagtcagcaactattgctgagtcagcaaactttgctgagtcagcaatgcttgctgagtcagcaagtaggcgcgccatgcttcatcagactct

SEQ ID NO: 1479 - DNA, 197 bp, Artificial Sequence; identical to SEQ ID NO: 1478
  Synthetic polynucleotide

SEQ ID NO: 1480 - DNA, 156 bp, Artificial Sequence
  Synthetic polynucleotide
atcatctcaccttgcctcctgtggaacacgatcctcctcctgcaggggtaagtaagaggtaagtatcgggtaagtagacggtaagtactaggtaagtaactggtaagtatgcggtaagtagtaggtaagtaggcgcgccatgcttcatcagactct

SEQ ID NO: 1481 - DNA, 156 bp, Artificial Sequence; identical to SEQ ID NO: 1480
  Synthetic polynucleotide

SEQ ID NO: 1482 - DNA, 188 bp, Artificial Sequence
  Synthetic polynucleotide
atcatctcaccttgcctcctggtcatcaccgtatatgacctgcaggatttttcctctgagaatttttcctctgtcgatttttcctctggacatttttcctctgctaatttttcctctgactatttttcctctgtgcatttttcctctggtaatttttcctctgggcgcgccatgcttcatcagactct

SEQ ID NO: 1483 - DNA, 188 bp, Artificial Sequence; identical to SEQ ID NO: 1482
  Synthetic polynucleotide

SEQ ID NO: 1484 - DNA, 190 bp, Artificial Sequence
  Synthetic polynucleotide
atcatctcaccttgcctcctggccacggtcgaactcttcctgcaggtgactgcacattcaagatgactgcacattcatcgtgactgcacattcagactgactgcacattcactatgactgcacattcaacttgactgcacattcatgctgactgcacattcagtaggcgcgccatgcttcatcagactct

SEQ ID NO: 1485 - DNA, 190 bp, Artificial Sequence; identical to SEQ ID NO: 1484
  Synthetic polynucleotide

SEQ ID NO: 1486 - DNA, 197 bp, Artificial Sequence
  Synthetic polynucleotide
atcatctcaccttgcctcctgtcctaaagtcccgggttcctgcagggctgtccatggtgctagagctgtccatggtgcttcggctgtccatggtgctgacgctgtccatggtgctctagctgtccatggtgctactgctgtccatggtgcttgcgctgtccatggtgctgtaggcgcgccatgcttcatcagactct

SEQ ID NO: 1487 - DNA, 197 bp, Artificial Sequence; identical to SEQ ID NO: 1486
  Synthetic polynucleotide

SEQ ID NO: 1488 - DNA, 190 bp, Artificial Sequence
  Synthetic polynucleotide
atcatctcaccttgcctcctggtccgatatgctcgggtcctgcaggaaaaagaggaagtaagaaaaaagaggaagtatcgaaaaagaggaagtagacaaaaagaggaagtactaaaaaagaggaagtaactaaaaagaggaagtatgcaaaaagaggaagtagtaggcgcgccatgcttcatcagactct

SEQ ID NO: 1489 - DNA, 190 bp, Artificial Sequence; identical to SEQ ID NO: 1488
  Synthetic polynucleotide

SEQ ID NO: 1490 - DNA, 196 bp, Artificial Sequence
  Synthetic polynucleotide
atcatctcaccttgcctcctgtctgatcgtccctaagacctgcagggttaatgattaacagagttaatgattaactcggttaatgattaacgacgttaatgattaacctagttaatgattaacactgttaatgattaactgcgttaatgattaacgtagttaatgattaacggcgcgccatgcttcatcagactct

SEQ ID NO: 1491 - DNA, 196 bp, Artificial Sequence; identical to SEQ ID NO: 1490
  Synthetic polynucleotide

SEQ ID NO: 1492 - DNA, 191 bp, Artificial Sequence
  Synthetic polynucleotide
atcatctcaccttgcctcctgagaaactactggaatgccctgcaggaggtcacagtttgacctagaaggtcacagtttgaccttcgaggtcacagtttgacctgacaggtcacagtttgacctctaaggtcacagtttgacctactaggtcacagtttgaccttgcggcgcgccatgcttcatcagactct

SEQ ID NO: 1493 - DNA, 191 bp, Artificial Sequence; identical to SEQ ID NO: 1492
  Synthetic polynucleotide

SEQ ID NO: 1494 - DNA, 185 bp, Artificial Sequence
  Synthetic polynucleotide
atcatctcaccttgcctcctgacagcttatacgtcgcacctgcagggggttactggcggtcaagagggttactggcggtcatcggggttactggcggtcagacgggttactggcggtcactagggttactggcggtcaactgggttactggcggtcatgcggcgcgccatgcttcatcagactct

SEQ ID NO: 1495 - DNA, 185 bp, Artificial Sequence; identical to SEQ ID NO: 1494
  Synthetic polynucleotide

SEQ ID NO: 1496 - DNA, 198 bp, Artificial Sequence
  Synthetic polynucleotide
atcatctcaccttgcctcctgtattattggagtgcgggcctgcaggatataattatgcaaattaaaagaagaatataattatgcaaattaaaagatcgatataattatgcaaattaaaagagacatataattatgcaaattaaaagactaatataattatgcaaattaaaagaggcgcgccatgcttcatcagactct

SEQ ID NO: 1497 - DNA, 198 bp, Artificial Sequence; identical to SEQ ID NO: 1496
  Synthetic polynucleotide

SEQ ID NO: 1498 - DNA, 172 bp, Artificial Sequence
  Synthetic polynucleotide
atcatctcaccttgcctcctgatagggaccttattctgcctgcaggggcggcgcggagaggcggcgcggtcgggcggcgcgggacggcggcgcggctaggcggcgcggactggcggcgcggtgcggcggcgcgggtaggcggcgcggggcgcgccatgcttcatcagactct

SEQ ID NO: 1499 - DNA, 172 bp, Artificial Sequence; identical to SEQ ID NO: 1498
  Synthetic polynucleotide

SEQ ID NO: 1500 - DNA, 172 bp, Artificial Sequence
  Synthetic polynucleotide
atcatctcaccttgcctcctgtgattgaagccatttcacctgcaggttcaagtggtagattcaagtggttcgttcaagtggtgacttcaagtggtctattcaagtggtactttcaagtggttgcttcaagtggtgtattcaagtggtggcgcgccatgcttcatcagactct

SEQ ID NO: 1501 - DNA, 172 bp, Artificial Sequence; identical to SEQ ID NO: 1500
  Synthetic polynucleotide

SEQ ID NO: 1502 - DNA, 172 bp, Artificial Sequence
  Synthetic polynucleotide
atcatctcaccttgcctcctgaagaacatacctggcaccctgcaggcagggggcgcagacagggggcgctcgcagggggcgcgaccagggggcgcctacagggggcgcactcagggggcgctgccagggggcgcgtacagggggcgcggcgcgccatgcttcatcagactct

SEQ ID NO: 1503 - DNA, 172 bp, Artificial Sequence; identical to SEQ ID NO: 1502
  Synthetic polynucleotide

SEQ ID NO: 1504 - DNA, 191 bp, Artificial Sequence
  Synthetic polynucleotide
atcatctcaccttgcctcctgaggtcgagcgcatatttcctgcaggttagccccgcccccctcagattagccccgcccccctctcgttagccccgcccccctcgacttagccccgcccccctcctattagccccgcccccctcactttagccccgcccccctctgcggcgcgccatgcttcatcagactct

SEQ ID NO: 1505 - DNA, 191 bp, Artificial Sequence; identical to SEQ ID NO: 1504
  Synthetic polynucleotide

SEQ ID NO: 1506 - DNA, 172 bp, Artificial Sequence
  Synthetic polynucleotide
atcatctcaccttgcctcctgtcatagttcaccgttatcctgcagggccggaagcgagagccggaagcgtcggccggaagcggacgccggaagcgctagccggaagcgactgccggaagcgtgcgccggaagcggtagccggaagcgggcgcgccatgcttcatcagactct

SEQ ID NO: 1507 - DNA, 172 bp, Artificial Sequence; identical to SEQ ID NO: 1506
  Synthetic polynucleotide

SEQ ID NO: 1508 - DNA, 197 bp, Artificial Sequence
  Synthetic polynucleotide
atcatctcaccttgcctcctgtggcccacgccttatgacctgcaggtccccccccccccccagatcccccccccccccctcgtccccccccccccccgactccccccccccccccctatccccccccccccccacttcccccccccccccctgctccccccccccccccgtaggcgcgccatgcttcatcagactct

SEQ ID NO: 1509 - DNA, 197 bp, Artificial Sequence; identical to SEQ ID NO: 1508
  Synthetic polynucleotide

SEQ ID NO: 1510 - DNA, 172 bp, Artificial Sequence
  Synthetic polynucleotide
atcatctcaccttgcctcctgagtgcattcgtcttgcccctgcaggaccacgtgtcagaaccacgtgtctcgaccacgtgtcgacaccacgtgtcctaaccacgtgtcactaccacgtgtctgcaccacgtgtcgtaaccacgtgtcggcgcgccatgcttcatcagactct

SEQ ID NO: 1511 - DNA, 172 bp, Artificial Sequence; identical to SEQ ID NO: 1510
  Synthetic polynucleotide

SEQ ID NO: 1512 - DNA, 183 bp, Artificial Sequence
  Synthetic polynucleotide
atcatctcaccttgcctcctgatagtatcaggcaggtacctgcaggaactacaattcccagaatgccccgcagaaactacaattcccagaatgccccgctcgaactacaattcccagaatgccccgcgacaactacaattcccagaatgccccgcctaggcgcgccatgcttcatcagactct

SEQ ID NO: 1513 - DNA, 183 bp, Artificial Sequence; identical to SEQ ID NO: 1512
  Synthetic polynucleotide

SEQ ID NO: 1514 - DNA, 190 bp, Artificial Sequence
  Synthetic polynucleotide
atcatctcaccttgcctcctggacgtataagtatctggcctgcaggctgcacccgctgccagactgcacccgctgcctcgctgcacccgctgccgacctgcacccgctgccctactgcacccgctgccactctgcacccgctgcctgcctgcacccgctgccgtaggcgcgccatgcttcatcagactct

SEQ ID NO: 1515 - DNA, 190 bp, Artificial Sequence; identical to SEQ ID NO: 1514
  Synthetic polynucleotide

SEQ ID NO: 1516 - DNA, 156 bp, Artificial Sequence
  Synthetic polynucleotide
atcatctcaccttgcctcctgcggctatcgttgttcgacctgcaggagaacagaagaagaacagatcgagaacagagacagaacagactaagaacagaactagaacagatgcagaacagagtaagaacagaggcgcgccatgcttcatcagactct

SEQ ID NO: 1517 - DNA, 156 bp, Artificial Sequence; identical to SEQ ID NO: 1516
  Synthetic polynucleotide

SEQ ID NO: 1518 - DNA, 185 bp, Artificial Sequence
  Synthetic polynucleotide
atcatctcaccttgcctcctggcaaatgcaagtttaagcctgcaggctacgcccactcaattagactacgcccactcaatttcgctacgcccactcaattgacctacgcccactcaattctactacgcccactcaattactctacgcccactcaatttgcggcgcgccatgcttcatcagactct

SEQ ID NO: 1519 - DNA, 185 bp, Artificial Sequence; identical to SEQ ID NO: 1518
  Synthetic polynucleotide

SEQ ID NO: 1520 - DNA, 197 bp, Artificial Sequence
  Synthetic polynucleotide
atcatctcaccttgcctcctgttgagactctgtccgggcctgcaggtggaccaatcagcactctagatggaccaatcagcactcttcgtggaccaatcagcactctgactggaccaatcagcactctctatggaccaatcagcactctacttggaccaatcagcactcttgcggcgcgccatgcttcatcagactct

SEQ ID NO: 1521 - DNA, 197 bp, Artificial Sequence; identical to SEQ ID NO: 1520
  Synthetic polynucleotide

SEQ ID NO: 1522 - DNA, 180 bp, Artificial Sequence
  Synthetic polynucleotide
atcatctcaccttgcctcctgcccagagtacctactttcctgcagggggtgagtcatagagggtgagtcattcggggtgagtcatgacgggtgagtcatctagggtgagtcatactgggtgagtcattgcgggtgagtcatgtagggtgagtcatggcgcgccatgcttcatcagactct

SEQ ID NO: 1523 - DNA, 180 bp, Artificial Sequence; identical to SEQ ID NO: 1522
  Synthetic polynucleotide

SEQ ID NO: 1524 - DNA, 191 bp, Artificial Sequence
  Synthetic polynucleotide
atcatctcaccttgcctcctgtcctatcctcggtcagccctgcagggataattaatccctcttagagataattaatccctctttcggataattaatccctcttgacgataattaatccctcttctagataattaatccctcttactgataattaatccctctttgcggcgcgccatgcttcatcagactct

SEQ ID NO: 1525 - DNA, 191 bp, Artificial Sequence; identical to SEQ ID NO: 1524
  Synthetic polynucleotide

SEQ ID NO: 1526 - DNA, 172 bp, Artificial Sequence
  Synthetic polynucleotide
atcatctcaccttgcctcctgcctactcgtttgtctaacctgcaggccatgtgcttagaccatgtgctttcgccatgtgcttgacccatgtgcttctaccatgtgcttactccatgtgctttgcccatgtgcttgtaccatgtgcttggcgcgccatgcttcatcagactct

SEQ ID NO: 1527 - DNA, 172 bp, Artificial Sequence; identical to SEQ ID NO: 1526
  Synthetic polynucleotide

SEQ ID NO: 1528 - DNA, 148 bp, Artificial Sequence
  Synthetic polynucleotide
atcatctcaccttgcctcctgggctacgagttagattacctgcagggcacgtgagagcacgtgtcggcacgtggacgcacgtgctagcacgtgactgcacgtgtgcgcacgtggtagcacgtgggcgcgccatgcttcatcagactct

SEQ ID NO: 1529 - DNA, 148 bp, Artificial Sequence; identical to SEQ ID NO: 1528
  Synthetic polynucleotide

SEQ ID NO: 1530 - DNA, 188 bp, Artificial Sequence
  Synthetic polynucleotide
atcatctcaccttgcctcctgtatgtagcaaaccaacccctgcagggaatgtttgtttagagaatgtttgttttcggaatgtttgtttgacgaatgtttgtttctagaatgtttgtttactgaatgtttgttttgcgaatgtttgtttgtagaatgtttgtttggcgcgccatgcttcatcagactct

SEQ ID NO: 1531 - DNA, 188 bp, Artificial Sequence; identical to SEQ ID NO: 1530
  Synthetic polynucleotide

SEQ ID NO: 1532 - DNA, 172 bp, Artificial Sequence
  Synthetic polynucleotide
atcatctcaccttgcctcctggggctggaattcggatccctgcaggcatgaccaccagacatgaccacctcgcatgaccaccgaccatgaccaccctacatgaccaccactcatgaccacctgccatgaccaccgtacatgaccaccggcgcgccatgcttcatcagactct

SEQ ID NO: 1533 - DNA, 172 bp, Artificial Sequence; identical to SEQ ID NO: 1532
  Synthetic polynucleotide

SEQ ID NO: 1534 - DNA, 164 bp, Artificial Sequence
  Synthetic polynucleotide
atcatctcaccttgcctcctgtggccgtacgaaacatacctgcaggagagataagagaagagataagtcgagagataaggacagagataagctaagagataagactagagataagtgcagagataaggtaagagataagggcgcgccatgcttcatcagactct

SEQ ID NO: 1535 - DNA, 164 bp, Artificial Sequence; identical to SEQ ID NO: 1534
  Synthetic polynucleotide

SEQ ID NO: 1536 - DNA, 190 bp, Artificial Sequence
  Synthetic polynucleotide
atcatctcaccttgcctcctgacgggattaatgcggatcctgcaggaacgtaaacaacatagaaacgtaaacaacattcgaacgtaaacaacatgacaacgtaaacaacatctaaacgtaaacaacatactaacgtaaacaacattgcaacgtaaacaacatgtaggcgcgccatgcttcatcagactct

SEQ ID NO: 1537 - DNA, 190 bp, Artificial Sequence; identical to SEQ ID NO: 1536
  Synthetic polynucleotide

SEQ ID NO: 1538 - DNA, 172 bp, Artificial Sequence
  Synthetic polynucleotide
atcatctcaccttgcctcctgctgccactgtcttaacacctgcaggcttaattaccagacttaattacctcgcttaattaccgaccttaattaccctacttaattaccactcttaattacctgccttaattaccgtacttaattaccggcgcgccatgcttcatcagactct

SEQ ID NO: 1539 - DNA, 172 bp, Artificial Sequence; identical to SEQ ID NO: 1538
  Synthetic polynucleotide

SEQ ID NO: 1540 - DNA, 191 bp, Artificial Sequence
  Synthetic polynucleotide
atcatctcaccttgcctcctggtgttgtatagcattctcctgcaggtaaaaggtgtgaaaattagataaaaggtgtgaaaatttcgtaaaaggtgtgaaaattgactaaaaggtgtgaaaattctataaaaggtgtgaaaattacttaaaaggtgtgaaaatttgcggcgcgccatgcttcatcagactct

SEQ ID NO: 1541 - DNA, 191 bp, Artificial Sequence; identical to SEQ ID NO: 1540
  Synthetic polynucleotide

SEQ ID NO: 1542 - DNA, 164 bp, Artificial Sequence
  Synthetic polynucleotide
atcatctcaccttgcctcctggcactttcctcagctgccctgcaggcaaaggtcaagacaaaggtcatcgcaaaggtcagaccaaaggtcactacaaaggtcaactcaaaggtcatgccaaaggtcagtacaaaggtcaggcgcgccatgcttcatcagactct

SEQ ID NO: 1543 - DNA, 164 bp, Artificial Sequence; identical to SEQ ID NO: 1542
  Synthetic polynucleotide

SEQ ID NO: 1544 - DNA, 172 bp, Artificial Sequence
  Synthetic polynucleotide
atcatctcaccttgcctcctgactctgaacgtacgaggcctgcaggcaataaaactagacaataaaacttcgcaataaaactgaccaataaaactctacaataaaactactcaataaaacttgccaataaaactgtacaataaaactggcgcgccatgcttcatcagactct

SEQ ID NO: 1545 - DNA, 172 bp, Artificial Sequence; identical to SEQ ID NO: 1544
  Synthetic polynucleotide

SEQ ID NO: 1546 - DNA, 164 bp, Artificial Sequence
  Synthetic polynucleotide
atcatctcaccttgcctcctgagcagtttatcttcactcctgcagggacaatgagagagacaatgagtcggacaatgaggacgacaatgagctagacaatgagactgacaatgagtgcgacaatgaggtagacaatgagggcgcgccatgcttcatcagactct

SEQ ID NO: 1547 - DNA, 164 bp, Artificial Sequence; identical to SEQ ID NO: 1546
  Synthetic polynucleotide

SEQ ID NO: 1548 - DNA, 197 bp, Artificial Sequence
  Synthetic polynucleotide
atcatctcaccttgcctcctgtgtggcacactgcggaacctgcaggaagcctcgtggccagagaaagcctcgtggccagtcgaagcctcgtggccaggacaagcctcgtggccagctaaagcctcgtggccagactaagcctcgtggccagtgcaagcctcgtggccaggtaggcgcgccatgcttcatcagactct

SEQ ID NO: 1549 - DNA, 197 bp, Artificial Sequence; identical to SEQ ID NO: 1548
  Synthetic polynucleotide

SEQ ID NO: 1550 - DNA, 196 bp, Artificial Sequence
  Synthetic polynucleotide
atcatctcaccttgcctcctgtaagtggacgcactagtcctgcaggctctttgttacgaagactctttgttacgatcgctctttgttacgagacctctttgttacgactactctttgttacgaactctctttgttacgatgcctctttgttacgagtactctttgttacgaggcgcgccatgcttcatcagactct

SEQ ID NO: 1551 - DNA, 196 bp, Artificial Sequence; identical to SEQ ID NO: 1550
  Synthetic polynucleotide

SEQ ID NO: 1552 - DNA, 190 bp, Artificial Sequence
  Synthetic polynucleotide
atcatctcaccttgcctcctggcaactgctcgagttatcctgcaggcctcggacagctgcagacctcggacagctgctcgcctcggacagctgcgaccctcggacagctgcctacctcggacagctgcactcctcggacagctgctgccctcggacagctgcgtaggcgcgccatgcttcatcagactct

SEQ ID NO: 1553 - DNA, 190 bp, Artificial Sequence; identical to SEQ ID NO: 1552
  Synthetic polynucleotide

SEQ ID NO: 1554 - DNA, 190 bp, Artificial Sequence
  Synthetic polynucleotide
atcatctcaccttgcctcctgacgggatatttagagttcctgcaggaaatggcgggaaacagaaaatggcgggaaactcgaaatggcgggaaacgacaaatggcgggaaacctaaaatggcgggaaacactaaatggcgggaaactgcaaatggcgggaaacgtaggcgcgccatgcttcatcagactct

SEQ ID NO: 1555 - DNA, 190 bp, Artificial Sequence; identical to SEQ ID NO: 1554
  Synthetic polynucleotide

SEQ ID NO: 1556 - DNA, 197 bp, Artificial Sequence
  Synthetic polynucleotide
atcatctcaccttgcctcctgtgtaaacgaatcacagccctgcaggcttatctgtccccaccagagacttatctgtccccaccagtcgcttatctgtccccaccaggaccttatctgtccccaccagctacttatctgtccccaccagactcttatctgtccccaccagtgcggcgcgccatgcttcatcagactct

SEQ ID NO: 1557 - DNA, 197 bp, Artificial Sequence; identical to SEQ ID NO: 1556
  Synthetic polynucleotide

SEQ ID NO: 1558 - DNA, 180 bp, Artificial Sequence
  Synthetic polynucleotide
atcatctcaccttgcctcctggttggccatgactcactcctgcaggtcctgtttacaagatcctgtttacatcgtcctgtttacagactcctgtttacactatcctgtttacaacttcctgtttacatgctcctgtttacagtatcctgtttacaggcgcgccatgcttcatcagactct

SEQ ID NO: 1559 - DNA, 180 bp, Artificial Sequence; identical to SEQ ID NO: 1558
  Synthetic polynucleotide

SEQ ID NO: 1560 - DNA, 197 bp, Artificial Sequence
  Synthetic polynucleotide
atcatctcaccttgcctcctgtgagctatccacatccacctgcaggaatgtggaaatgagtcagagaaatgtggaaatgagtcagtcgaatgtggaaatgagtcaggacaatgtggaaatgagtcagctaaatgtggaaatgagtcagactaatgtggaaatgagtcagtgcggcgcgccatgcttcatcagactct

SEQ ID NO: 1561 - DNA, 197 bp, Artificial Sequence; identical to SEQ ID NO: 1560
  Synthetic polynucleotide

SEQ ID NO: 1562 - DNA, 172 bp, Artificial Sequence
  Synthetic polynucleotide
atcatctcaccttgcctcctgtagggcctagcctcaaacctgcaggttatttttagagattatttttagtcgttatttttaggacttatttttagctattatttttagactttatttttagtgcttatttttaggtattatttttagggcgcgccatgcttcatcagactct

SEQ ID NO: 1563 - DNA, 172 bp, Artificial Sequence; identical to SEQ ID NO: 1562
  Synthetic polynucleotide

SEQ ID NO: 1564 - DNA, 190 bp, Artificial Sequence
  Synthetic polynucleotide
atcatctcaccttgcctcctgtcgggcatgttatgacgcctgcaggaccggatttccggtagaaccggatttccggttcgaccggatttccggtgacaccggatttccggtctaaccggatttccggtactaccggatttccggttgcaccggatttccggtgtaggcgcgccatgcttcatcagactct

SEQ ID NO: 1565 - DNA, 190 bp, Artificial Sequence; identical to SEQ ID NO: 1564
  Synthetic polynucleotide

SEQ ID NO: 1566 - DNA, 180 bp, Artificial Sequence
  Synthetic polynucleotide
atcatctcaccttgcctcctgggaagcaccagccattccctgcaggtattgtgcaatagatattgtgcaattcgtattgtgcaatgactattgtgcaatctatattgtgcaatacttattgtgcaattgctattgtgcaatgtatattgtgcaatggcgcgccatgcttcatcagactct

SEQ ID NO: 1567 - DNA, 180 bp, Artificial Sequence; identical to SEQ ID NO: 1566
  Synthetic polynucleotide

SEQ ID NO: 1568 - DNA, 188 bp, Artificial Sequence
  Synthetic polynucleotide
atcatctcaccttgcctcctggatcatcgagcgactctcctgcagggtaaacaatagaagagtaaacaatagatcggtaaacaatagagacgtaaacaatagactagtaaacaatagaactgtaaacaatagatgcgtaaacaatagagtagtaaacaatagaggcgcgccatgcttcatcagactct

SEQ ID NO: 1569 - DNA, 188 bp, Artificial Sequence; identical to SEQ ID NO: 1568
  Synthetic polynucleotide

SEQ ID NO: 1570 - DNA, 180 bp, Artificial Sequence
  Synthetic polynucleotide
atcatctcaccttgcctcctgctagttaattcagcagtcctgcaggattgcacaataagaattgcacaatatcgattgcacaatagacattgcacaatactaattgcacaataactattgcacaatatgcattgcacaatagtaattgcacaataggcgcgccatgcttcatcagactct

SEQ ID NO: 1571 - DNA, 180 bp, Artificial Sequence; identical to SEQ ID NO: 1570
  Synthetic polynucleotide

SEQ ID NO: 1572 - DNA, 196 bp, Artificial Sequence
  Synthetic polynucleotide
atcatctcaccttgcctcctggtaatagtgtcaatgcgcctgcaggggtttcacttttcagaggtttcacttttctcgggtttcacttttcgacggtttcacttttcctaggtttcacttttcactggtttcacttttctgcggtttcacttttcgtaggtttcacttttcggcgcgccatgcttcatcagactct

SEQ ID NO: 1573 - DNA, 196 bp, Artificial Sequence; identical to SEQ ID NO: 1572
  Synthetic polynucleotide

SEQ ID NO: 1574 - DNA, 197 bp, Artificial Sequence
  Synthetic polynucleotide
atcatctcaccttgcctcctggtgggattggttgagtccctgcaggccactaggtggcactagaccactaggtggcacttcgccactaggtggcactgacccactaggtggcactctaccactaggtggcactactccactaggtggcacttgcccactaggtggcactgtaggcgcgccatgcttcatcagactct

SEQ ID NO: 1575 - DNA, 197 bp, Artificial Sequence; identical to SEQ ID NO: 1574
  Synthetic polynucleotide

SEQ ID NO: 1576 - DNA, 188 bp, Artificial Sequence
  Synthetic polynucleotide
atcatctcaccttgcctcctggtagtgctcggatgcgacctgcaggtgccccctgacaagatgccccctgacatcgtgccccctgacagactgccccctgacactatgccccctgacaacttgccccctgacatgctgccccctgacagtatgccccctgacaggcgcgccatgcttcatcagactct

SEQ ID NO: 1577 - DNA, 188 bp, Artificial Sequence; identical to SEQ ID NO: 1576
  Synthetic polynucleotide

SEQ ID NO: 1578 - DNA, 172 bp, Artificial Sequence
  Synthetic polynucleotide
atcatctcaccttgcctcctgggttgtctacgtacaggcctgcagggttatgcaacagagttatgcaactcggttatgcaacgacgttatgcaacctagttatgcaacactgttatgcaactgcgttatgcaacgtagttatgcaacggcgcgccatgcttcatcagactct

SEQ ID NO: 1579 - DNA, 172 bp, Artificial Sequence; identical to SEQ ID NO: 1578
  Synthetic polynucleotide

SEQ ID NO: 1580 - DNA, 190 bp, Artificial Sequence
  Synthetic polynucleotide
atcatctcaccttgcctcctggcgatattcgagccgctcctgcaggcggggatacgaaatagacggggatacgaaattcgcggggatacgaaatgaccggggatacgaaatctacggggatacgaaatactcggggatacgaaattgccggggatacgaaatgtaggcgcgccatgcttcatcagactct

SEQ ID NO: 1581 - DNA, 190 bp, Artificial Sequence; identical to SEQ ID NO: 1580
  Synthetic polynucleotide

SEQ ID NO: 1582 - DNA, 185 bp, Artificial Sequence
  Synthetic polynucleotide
atcatctcaccttgcctcctgtgcgaagaccactcctgcctgcaggccttatatttatttttagaccttatatttattttttcgccttatatttatttttgacccttatatttatttttctaccttatatttatttttactccttatatttattttttgcggcgcgccatgcttcatcagactct

SEQ ID NO: 1583 - DNA, 185 bp, Artificial Sequence; identical to SEQ ID NO: 1582
  Synthetic polynucleotide

SEQ ID NO: 1584 - DNA, 180 bp, Artificial Sequence
  Synthetic polynucleotide
atcatctcaccttgcctcctggcagccgtaatccaatacctgcaggggggcgggaagagaggggcgggaagtcgggggcgggaaggacggggcgggaagctaggggcgggaagactggggcgggaagtgcggggcgggaaggtaggggcgggaagggcgcgccatgcttcatcagactct

SEQ ID NO: 1585 - DNA, 180 bp, Artificial Sequence; identical to SEQ ID NO: 1584
  Synthetic polynucleotide

SEQ ID NO: 1586 - DNA, 164 bp, Artificial Sequence
  Synthetic polynucleotide
atcatctcaccttgcctcctgatcacaatgacggattccctgcaggtttattgccagatttattgcctcgtttattgccgactttattgccctatttattgccacttttattgcctgctttattgccgtatttattgccggcgcgccatgcttcatcagactct

SEQ ID NO: 1587 - DNA, 164 bp, Artificial Sequence; identical to SEQ ID NO: 1586
  Synthetic polynucleotide

SEQ ID NO: 1588 - DNA, 156 bp, Artificial Sequence
  Synthetic polynucleotide
atcatctcaccttgcctcctggtgtcattcaacccgcacctgcaggatgacctcagaatgacctctcgatgacctcgacatgacctcctaatgacctcactatgacctctgcatgacctcgtaatgacctcggcgcgccatgcttcatcagactct

SEQ ID NO: 1589 - DNA, 156 bp, Artificial Sequence; identical to SEQ ID NO: 1588
  Synthetic polynucleotide

SEQ ID NO: 1590 - DNA, 190 bp, Artificial Sequence
  Synthetic polynucleotide
atcatctcaccttgcctcctgtgggatgtacatgcacgcctgcaggcaacaatgtaacaaagacaacaatgtaacaatcgcaacaatgtaacaagaccaacaatgtaacaactacaacaatgtaacaaactcaacaatgtaacaatgccaacaatgtaacaagtaggcgcgccatgcttcatcagactct

SEQ ID NO: 1591 - DNA, 190 bp, Artificial Sequence; identical to SEQ ID NO: 1590
  Synthetic polynucleotide

SEQ ID NO: 1592 - DNA, 180 bp, Artificial Sequence
  Synthetic polynucleotide
atcatctcaccttgcctcctgagataccgagagaaggtcctgcaggattgcacaattagaattgcacaatttcgattgcacaattgacattgcacaattctaattgcacaattactattgcacaatttgcattgcacaattgtaattgcacaattggcgcgccatgcttcatcagactct

SEQ ID NO: 1593 - DNA, 180 bp, Artificial Sequence; identical to SEQ ID NO: 1592
  Synthetic polynucleotide

SEQ ID NO: 1594 - DNA, 156 bp, Artificial Sequence
  Synthetic polynucleotide
atcatctcaccttgcctcctgactgtagcgccaccgttcctgcaggcactaggtagacactaggttcgcactaggtgaccactaggtctacactaggtactcactaggttgccactaggtgtacactaggtggcgcgccatgcttcatcagactct

SEQ ID NO: 1595 - DNA, 156 bp, Artificial Sequence; identical to SEQ ID NO: 1594
  Synthetic polynucleotide

SEQ ID NO: 1596 - DNA, 196 bp, Artificial Sequence
  Synthetic polynucleotide
atcatctcaccttgcctcctgacaccatgtatacgaaccctgcagggattgtttatttaagagattgtttatttatcggattgtttatttagacgattgtttatttactagattgtttatttaactgattgtttatttatgcgattgtttatttagtagattgtttatttaggcgcgccatgcttcatcagactct

SEQ ID NO: 1597 - DNA, 196 bp, Artificial Sequence; identical to SEQ ID NO: 1596
  Synthetic polynucleotide

SEQ ID NO: 1598 - DNA, 180 bp, Artificial Sequence
  Synthetic polynucleotide
atcatctcaccttgcctcctgtatcatagggttcgaagcctgcaggtcatttcctgcagatcatttcctgctcgtcatttcctgcgactcatttcctgcctatcatttcctgcacttcatttcctgctgctcatttcctgcgtatcatttcctgcggcgcgccatgcttcatcagactct

SEQ ID NO: 1599 - DNA, 180 bp, Artificial Sequence; identical to SEQ ID NO: 1598
  Synthetic polynucleotide

SEQ ID NO: 1600 - DNA, 190 bp, Artificial Sequence
  Synthetic polynucleotide
atcatctcaccttgcctcctgatccagtaccggtgaatcctgcaggacattgcacaatctagaacattgcacaatcttcgacattgcacaatctgacacattgcacaatctctaacattgcacaatctactacattgcacaatcttgcacattgcacaatctgtaggcgcgccatgcttcatcagactct

SEQ ID NO: 1601 - DNA, 190 bp, Artificial Sequence; identical to SEQ ID NO: 1600
  Synthetic polynucleotide

SEQ ID NO: 1602 - DNA, 188 bp, Artificial Sequence
  Synthetic polynucleotide
atcatctcaccttgcctcctgagagcacgatgccaaaccctgcaggccaataatcgatagaccaataatcgattcgccaataatcgatgacccaataatcgatctaccaataatcgatactccaataatcgattgcccaataatcgatgtaccaataatcgatggcgcgccatgcttcatcagactct

SEQ ID NO: 1603 - DNA, 188 bp, Artificial Sequence; identical to SEQ ID NO: 1602
  Synthetic polynucleotide

SEQ ID NO: 1604 - DNA, 156 bp, Artificial Sequence
  Synthetic polynucleotide
atcatctcaccttgcctcctgcaggatccaccttctgccctgcaggaatttagaagaaatttagatcgaatttagagacaatttagactaaatttagaactaatttagatgcaatttagagtaaatttagaggcgcgccatgcttcatcagactct

SEQ ID NO: 1605 - DNA, 156 bp, Artificial Sequence; identical to SEQ ID NO: 1604
  Synthetic polynucleotide

SEQ ID NO: 1606 - DNA, 196 bp, Artificial Sequence
  Synthetic polynucleotide
atcatctcaccttgcctcctgagagagcacaagagaaccctgcaggcagtcacgtggtcagacagtcacgtggtctcgcagtcacgtggtcgaccagtcacgtggtcctacagtcacgtggtcactcagtcacgtggtctgccagtcacgtggtcgtacagtcacgtggtcggcgcgccatgcttcatcagactct

SEQ ID NO: 1607 - DNA, 196 bp, Artificial Sequence; identical to SEQ ID NO: 1606
  Synthetic polynucleotide

SEQ ID NO: 1608 - DNA, 188 bp, Artificial Sequence
  Synthetic polynucleotide
atcatctcaccttgcctcctggctcgttcccgattaatcctgcagggcgctttgttctagagcgctttgttcttcggcgctttgttctgacgcgctttgttctctagcgctttgttctactgcgctttgttcttgcgcgctttgttctgtagcgctttgttctggcgcgccatgcttcatcagactct

SEQ ID NO: 1609 - DNA, 188 bp, Artificial Sequence; identical to SEQ ID NO: 1608
  Synthetic polynucleotide

SEQ ID NO: 1610 - DNA, 197 bp, Artificial Sequence
  Synthetic polynucleotide
atcatctcaccttgcctcctgactaggccgtggatcgtcctgcaggccaccagagggcgctataagaccaccagagggcgctatatcgccaccagagggcgctatagacccaccagagggcgctatactaccaccagagggcgctataactccaccagagggcgctatatgcggcgcgccatgcttcatcagactct

SEQ ID NO: 1611 - DNA, 197 bp, Artificial Sequence; identical to SEQ ID NO: 1610
  Synthetic polynucleotide

SEQ ID NO: 1612 - DNA, 197 bp, Artificial Sequence
  Synthetic polynucleotide
atcatctcaccttgcctcctgaaacgttgacccagctgcctgcaggagagtgctgattggtccaagaagagtgctgattggtccatcgagagtgctgattggtccagacagagtgctgattggtccactaagagtgctgattggtccaactagagtgctgattggtccatgcggcgcgccatgcttcatcagactct

SEQ ID NO: 1613 - DNA, 197 bp, Artificial Sequence; identical to SEQ ID NO: 1612
  Synthetic polynucleotide

SEQ ID NO: 1614 - DNA, 197 bp, Artificial Sequence
  Synthetic polynucleotide
atcatctcaccttgcctcctggatatcttaaggcgtaccctgcaggactgttaattattaaccaagaactgttaattattaaccatcgactgttaattattaaccagacactgttaattattaaccactaactgttaattattaaccaactactgttaattattaaccatgcggcgcgccatgcttcatcagactct

SEQ ID NO: 1615 - DNA, 197 bp, Artificial Sequence; identical to SEQ ID NO: 1614
  Synthetic polynucleotide

SEQ ID NO: 1616 - DNA, 191 bp, Artificial Sequence
  Synthetic polynucleotide
atcatctcaccttgcctcctggtgtctctctacaccggcctgcaggtcctcacttcctgtggcagatcctcacttcctgtggctcgtcctcacttcctgtggcgactcctcacttcctgtggcctatcctcacttcctgtggcacttcctcacttcctgtggctgcggcgcgccatgcttcatcagactct

SEQ ID NO: 1617 - DNA, 191 bp, Artificial Sequence; identical to SEQ ID NO: 1616
  Synthetic polynucleotide

SEQ ID NO: 1618 - DNA, 186 bp, Artificial Sequence
  Synthetic polynucleotide
atcatctcaccttgcctcctgcttatgaaagccgccatcctgcaggtcacaccttctaaggtgtgaagatcacaccttctaaggtgtgatcgtcacaccttctaaggtgtgagactcacaccttctaaggtgtgactatcacaccttctaaggtgtgaactggcgcgccatgcttcatcagactct

SEQ ID NO: 1619 - DNA, 186 bp, Artificial Sequence; identical to SEQ ID NO: 1618
  Synthetic polynucleotide

SEQ ID NO: 1620 - DNA, 148 bp, Artificial Sequence
  Synthetic polynucleotide
atcatctcaccttgcctcctgtacccataccaggccttcctgcagggtgttgtagagtgttgttcggtgttgtgacgtgttgtctagtgttgtactgtgttgttgcgtgttgtgtagtgttgtggcgcgccatgcttcatcagactct

SEQ ID NO: 1621 - DNA, 148 bp, Artificial Sequence; identical to SEQ ID NO: 1620
  Synthetic polynucleotide

SEQ ID NO: 1622 - DNA, 172 bp, Artificial Sequence
  Synthetic polynucleotide
atcatctcaccttgcctcctgcacggctaattggtctccctgcaggaattttccacagaaattttccactcgaattttccacgacaattttccacctaaattttccacactaattttccactgcaattttccacgtaaattttccacggcgcgccatgcttcatcagactct

SEQ ID NO: 1623 - DNA, 172 bp, Artificial Sequence; identical to SEQ ID NO: 1622
  Synthetic polynucleotide

SEQ ID NO: 1624 - DNA, 197 bp, Artificial Sequence
  Synthetic polynucleotide
atcatctcaccttgcctcctggtaatgtctgcgctccccctgcaggggcgcaggtgtttttagaggcgcaggtgttttttcgggcgcaggtgtttttgacggcgcaggtgtttttctaggcgcaggtgtttttactggcgcaggtgttttttgcggcgcaggtgtttttgtaggcgcgccatgcttcatcagactct

SEQ ID NO: 1625 - DNA, 197 bp, Artificial Sequence; identical to SEQ ID NO: 1624
  Synthetic polynucleotide

SEQ ID NO: 1626 - DNA, 191 bp, Artificial Sequence
  Synthetic polynucleotide
atcatctcaccttgcctcctgtatccaacaaagtaaggcctgcaggagtaattaattaattcgagaagtaattaattaattcgtcgagtaattaattaattcggacagtaattaattaattcgctaagtaattaattaattcgactagtaattaattaattcgtgcggcgcgccatgcttcatcagactct

SEQ ID NO: 1627 - DNA, 191 bp, Artificial Sequence; identical to SEQ ID NO: 1626
  Synthetic polynucleotide

SEQ ID NO: 1628 - DNA, 180 bp, Artificial Sequence
  Synthetic polynucleotide
atcatctcaccttgcctcctgattgcgagatctctgtgcctgcaggttgcacttcctagattgcacttccttcgttgcacttcctgacttgcacttcctctattgcacttcctactttgcacttccttgcttgcacttcctgtattgcacttcctggcgcgccatgcttcatcagactct

SEQ ID NO: 1629 - DNA, 180 bp, Artificial Sequence; identical to SEQ ID NO: 1628
  Synthetic polynucleotide

SEQ ID NO: 1630 - DNA, 191 bp, Artificial Sequence
  Synthetic polynucleotide
atcatctcaccttgcctcctggtcagtcaagtaagtaccctgcaggaagttattaattaattaagaaagttattaattaattatcgaagttattaattaattagacaagttattaattaattactaaagttattaattaattaactaagttattaattaattatgcggcgcgccatgcttcatcagactct

SEQ ID NO: 1631 - DNA, 191 bp, Artificial Sequence; identical to SEQ ID NO: 1630
  Synthetic polynucleotide

SEQ ID NO: 1632 - DNA, 185 bp, Artificial Sequence
  Synthetic polynucleotide
atcatctcaccttgcctcctggcggaaggtggataatacctgcaggctgtgggaaacgagatagactgtgggaaacgagattcgctgtgggaaacgagatgacctgtgggaaacgagatctactgtgggaaacgagatactctgtgggaaacgagattgcggcgcgccatgcttcatcagactct

SEQ ID NO: 1633 - DNA, 185 bp, Artificial Sequence; identical to SEQ ID NO: 1632
  Synthetic polynucleotide

SEQ ID NO: 1634 - DNA, 188 bp, Artificial Sequence
  Synthetic polynucleotide
atcatctcaccttgcctcctgcacctggaacgtttgctcctgcaggaagcacgtgattagaaagcacgtgatttcgaagcacgtgattgacaagcacgtgattctaaagcacgtgattactaagcacgtgatttgcaagcacgtgattgtaaagcacgtgattggcgcgccatgcttcatcagactct

SEQ ID NO: 1635 - DNA, 188 bp, Artificial Sequence; identical to SEQ ID NO: 1634
  Synthetic polynucleotide

SEQ ID NO: 1636 - DNA, 180 bp, Artificial Sequence
  Synthetic polynucleotide
atcatctcaccttgcctcctgttgatttgcgggtgggacctgcaggggggcgggaaaagaggggcgggaaatcgggggcgggaaagacggggcgggaaactaggggcgggaaaactggggcgggaaatgcggggcgggaaagtaggggcgggaaaggcgcgccatgcttcatcagactct

SEQ ID NO: 1637 - DNA, 180 bp, Artificial Sequence; identical to SEQ ID NO: 1636
  Synthetic polynucleotide

SEQ ID NO: 1638 - DNA, 180 bp, Artificial Sequence
  Synthetic polynucleotide
atcatctcaccttgcctcctgaacaagcctagcacccacctgcaggtttcccacggtagatttcccacggttcgtttcccacggtgactttcccacggtctatttcccacggtacttttcccacggttgctttcccacggtgtatttcccacggtggcgcgccatgcttcatcagactct

SEQ ID NO: 1639 - DNA, 180 bp, Artificial Sequence; identical to SEQ ID NO: 1638
  Synthetic polynucleotide

SEQ ID NO: 1640 - DNA, 200 bp, Artificial Sequence
  Synthetic polynucleotide
atcatctcaccttgcctcctgttgctgcctcagaaactcctgcaggaaaaagaggaagtgaaactagaaaaaagaggaagtgaaacttcgaaaaagaggaagtgaaactgacaaaaagaggaagtgaaactctaaaaaagaggaagtgaaactactaaaaagaggaagtgaaactggcgcgccatgcttcatcagactct

SEQ ID NO: 1641 - DNA, 200 bp, Artificial Sequence; identical to SEQ ID NO: 1640
  Synthetic polynucleotide

SEQ ID NO: 1642 - DNA, 172 bp, Artificial Sequence
  Synthetic polynucleotide
atcatctcaccttgcctcctgctcggaatcaccatacccctgcagggttgctagggagagttgctagggtcggttgctaggggacgttgctagggctagttgctagggactgttgctagggtgcgttgctaggggtagttgctagggggcgcgccatgcttcatcagactct

SEQ ID NO: 1643 - DNA, 172 bp, Artificial Sequence; identical to SEQ ID NO: 1642
  Synthetic polynucleotide

SEQ ID NO: 1644 - DNA, 190 bp, Artificial Sequence
  Synthetic polynucleotide
atcatctcaccttgcctcctgcttggccatttccgtatcctgcaggcactgccccctcctagacactgccccctccttcgcactgccccctcctgaccactgccccctcctctacactgccccctcctactcactgccccctccttgccactgccccctcctgtaggcgcgccatgcttcatcagactct

SEQ ID NO: 1645 - DNA, 190 bp, Artificial Sequence; identical to SEQ ID NO: 1644
  Synthetic polynucleotide

SEQ ID NO: 1646 - DNA, 186 bp, Artificial Sequence
  Synthetic polynucleotide
atcatctcaccttgcctcctgtgacacctacgcaaatgcctgcaggggtgctgtccgtggtgctgaagaggtgctgtccgtggtgctgatcgggtgctgtccgtggtgctgagacggtgctgtccgtggtgctgactaggtgctgtccgtggtgctgaactggcgcgccatgcttcatcagactct

SEQ ID NO: 1647 - DNA, 186 bp, Artificial Sequence; identical to SEQ ID NO: 1646
  Synthetic polynucleotide

SEQ ID NO: 1648 - DNA, 197 bp, Artificial Sequence
  Synthetic polynucleotide
atcatctcaccttgcctcctggtggaatcaaagtgatgcctgcagggacccggaagcacttagagacccggaagcactttcggacccggaagcacttgacgacccggaagcacttctagacccggaagcacttactgacccggaagcactttgcgacccggaagcacttgtaggcgcgccatgcttcatcagactct

SEQ ID NO: 1649 - DNA, 197 bp, Artificial Sequence; identical to SEQ ID NO: 1648
  Synthetic polynucleotide

SEQ ID NO: 1650 - DNA, 172 bp, Artificial Sequence
  Synthetic polynucleotide
atcatctcaccttgcctcctgtacggaggccgtatagacctgcaggccctggcaacagaccctggcaactcgccctggcaacgacccctggcaacctaccctggcaacactccctggcaactgcccctggcaacgtaccctggcaacggcgcgccatgcttcatcagactct

SEQ ID NO: 1651 - DNA, 172 bp, Artificial Sequence; identical to SEQ ID NO: 1650
  Synthetic polynucleotide

SEQ ID NO: 1652 - DNA, 180 bp, Artificial Sequence
  Synthetic polynucleotide
atcatctcaccttgcctcctgagaccacaatctggcaacctgcaggttatgtaacgtagattatgtaacgttcgttatgtaacgtgacttatgtaacgtctattatgtaacgtactttatgtaacgttgcttatgtaacgtgtattatgtaacgtggcgcgccatgcttcatcagactct

SEQ ID NO: 1653 - DNA, 180 bp, Artificial Sequence; identical to SEQ ID NO: 1652
  Synthetic polynucleotide

SEQ ID NO: 1654 - DNA, 172 bp, Artificial Sequence
  Synthetic polynucleotide
atcatctcaccttgcctcctgctggcagtatagcataccctgcagggcacgtgaccagagcacgtgacctcggcacgtgaccgacgcacgtgaccctagcacgtgaccactgcacgtgacctgcgcacgtgaccgtagcacgtgaccggcgcgccatgcttcatcagactct

SEQ ID NO: 1655 - DNA, 172 bp, Artificial Sequence; identical to SEQ ID NO: 1654
  Synthetic polynucleotide

SEQ ID NO: 1656 - DNA, 196 bp, Artificial Sequence
  Synthetic polynucleotide
atcatctcaccttgcctcctgggagtctcaggaacgatcctgcaggtgcaatagtgccatctagtggtagatgcaatagtgccatctagtggttcgtgcaatagtgccatctagtggtgactgcaatagtgccatctagtggtctatgcaatagtgccatctagtggtactggcgcgccatgcttcatcagactct

SEQ ID NO: 1657 - DNA, 196 bp, Artificial Sequence; identical to SEQ ID NO: 1656
  Synthetic polynucleotide

SEQ ID NO: 1658 - DNA, 156 bp, Artificial Sequence
  Synthetic polynucleotide
atcatctcaccttgcctcctgcctgtggagtgagctcacctgcaggatgaccttagaatgacctttcgatgaccttgacatgaccttctaatgaccttactatgacctttgcatgaccttgtaatgaccttggcgcgccatgcttcatcagactct

SEQ ID NO: 1659 - DNA, 156 bp, Artificial Sequence; identical to SEQ ID NO: 1658
  Synthetic polynucleotide

SEQ ID NO: 1660 - DNA, 180 bp, Artificial Sequence
  Synthetic polynucleotide
atcatctcaccttgcctcctggccaatgcacactatatcctgcaggagccaatgggaagaagccaatgggatcgagccaatgggagacagccaatgggactaagccaatgggaactagccaatgggatgcagccaatgggagtaagccaatgggaggcgcgccatgcttcatcagactct

SEQ ID NO: 1661 - DNA, 180 bp, Artificial Sequence; identical to SEQ ID NO: 1660
  Synthetic polynucleotide

SEQ ID NO: 1662 - DNA, 196 bp, Artificial Sequence
  Synthetic polynucleotide
atcatctcaccttgcctcctggcctattgaaagaggtacctgcaggaaaattaattaatagaaaaattaattaattcgaaaattaattaatgacaaaattaattaatctaaaaattaattaatactaaaattaattaattgcaaaattaattaatgtaaaaattaattaatggcgcgccatgcttcatcagactct

SEQ ID NO: 1663 - DNA, 196 bp, Artificial Sequence; identical to SEQ ID NO: 1662
  Synthetic polynucleotide

SEQ ID NO: 1664 - DNA, 164 bp, Artificial Sequence
  Synthetic polynucleotide
atcatctcaccttgcctcctgacgtatagtaggtaggccctgcagggcccgggggagagcccgggggtcggcccggggggacgcccgggggctagcccgggggactgcccgggggtgcgcccggggggtagcccgggggggcgcgccatgcttcatcagactct

SEQ ID NO: 1665 - DNA, 164 bp, Artificial Sequence; identical to SEQ ID NO: 1664
  Synthetic polynucleotide

SEQ ID NO: 1666 - DNA, 186 bp, Artificial Sequence
  Synthetic polynucleotide
atcatctcaccttgcctcctggaaatctaacaacaccacctgcaggagagcactgaagcgtaaccgagaagagcactgaagcgtaaccgtcgagagcactgaagcgtaaccggacagagcactgaagcgtaaccgctaagagcactgaagcgtaaccgactggcgcgccatgcttcatcagactct

SEQ ID NO: 1667 - DNA, 186 bp, Artificial Sequence; identical to SEQ ID NO: 1666
  Synthetic polynucleotide

SEQ ID NO: 1668 - DNA, 197 bp, Artificial Sequence
  Synthetic polynucleotide
atcatctcaccttgcctcctgtcgtatgggtcggtagacctgcaggatgacgcatacccccagaatgacgcataccccctcgatgacgcatacccccgacatgacgcatacccccctaatgacgcatacccccactatgacgcataccccctgcatgacgcatacccccgtaggcgcgccatgcttcatcagactct

SEQ ID NO: 1669 - DNA, 197 bp, Artificial Sequence; identical to SEQ ID NO: 1668
  Synthetic polynucleotide

SEQ ID NO: 1670 - DNA, 185 bp, Artificial Sequence
  Synthetic polynucleotide
atcatctcaccttgcctcctgtggtctaatctgtgtcacctgcaggcggcagtaaccgtgggagacggcagtaaccgtgggtcgcggcagtaaccgtggggaccggcagtaaccgtgggctacggcagtaaccgtgggactcggcagtaaccgtgggtgcggcgcgccatgcttcatcagactct

SEQ ID NO: 1671 - DNA, 185 bp, Artificial Sequence; identical to SEQ ID NO: 1670
  Synthetic polynucleotide

SEQ ID NO: 1672 - DNA, 172 bp, Artificial Sequence
  Synthetic polynucleotide
atcatctcaccttgcctcctgcgtctcatacacttagccctgcaggtgtgggggggagatgtgggggggtcgtgtggggggggactgtgggggggctatgtgggggggacttgtgggggggtgctgtggggggggtatgtgggggggggcgcgccatgcttcatcagactct

SEQ ID NO: 1673 - DNA, 172 bp, Artificial Sequence; identical to SEQ ID NO: 1672
  Synthetic polynucleotide

SEQ ID NO: 1674 - DNA, 164 bp, Artificial Sequence
  Synthetic polynucleotide
atcatctcaccttgcctcctgtgcgtcatcttggtactcctgcagggacagctgcagagacagctgctcggacagctgcgacgacagctgcctagacagctgcactgacagctgctgcgacagctgcgtagacagctgcggcgcgccatgcttcatcagactct

SEQ ID NO: 1675 - DNA, 164 bp, Artificial Sequence; identical to SEQ ID NO: 1674
  Synthetic polynucleotide

SEQ ID NO: 1676 - DNA, 197 bp, Artificial Sequence
  Synthetic polynucleotide
atcatctcaccttgcctcctgaagtgacaatatggtcacctgcaggccaccagggggcgctagaccaccagggggcgcttcgccaccagggggcgctgacccaccagggggcgctctaccaccagggggcgctactccaccagggggcgcttgcccaccagggggcgctgtaggcgcgccatgcttcatcagactct

SEQ ID NO: 1677 - DNA, 197 bp, Artificial Sequence; identical to SEQ ID NO: 1676
  Synthetic polynucleotide

SEQ ID NO: 1678 - DNA, 191 bp, Artificial Sequence
  Synthetic polynucleotide
atcatctcaccttgcctcctggttctgcacgctatcaccctgcagggacgataatgaggttgcagagacgataatgaggttgctcggacgataatgaggttgcgacgacgataatgaggttgcctagacgataatgaggttgcactgacgataatgaggttgctgcggcgcgccatgcttcatcagactct

SEQ ID NO: 1679 - DNA, 191 bp, Artificial Sequence; identical to SEQ ID NO: 1678
  Synthetic polynucleotide

SEQ ID NO: 1680 - DNA, 132 bp, Artificial Sequence
  Synthetic polynucleotide
atcatctcaccttgcctcctgcataccaaaccgcgtaacctgcaggtaattagataatttcgtaattgactaattctataattacttaatttgctaattgtataattggcgcgccatgcttcatcagactct

SEQ ID NO: 1681 - DNA, 132 bp, Artificial Sequence; identical to SEQ ID NO: 1680
  Synthetic polynucleotide

SEQ ID NO: 1682 - DNA, 196 bp, Artificial Sequence
  Synthetic polynucleotide
atcatctcaccttgcctcctgcgtgcgaaatacgcattcctgcaggtttcagtatgactagatttcagtatgacttcgtttcagtatgactgactttcagtatgactctatttcagtatgactacttttcagtatgacttgctttcagtatgactgtatttcagtatgactggcgcgccatgcttcatcagactct

SEQ ID NO: 1683 - DNA, 196 bp, Artificial Sequence; identical to SEQ ID NO: 1682
  Synthetic polynucleotide

SEQ ID NO: 1684 - DNA, 172 bp, Artificial Sequence
  Synthetic polynucleotide
atcatctcaccttgcctcctgaatgaacttagcctggccctgcaggactgtatcaaagaactgtatcaatcgactgtatcaagacactgtatcaactaactgtatcaaactactgtatcaatgcactgtatcaagtaactgtatcaaggcgcgccatgcttcatcagactct

SEQ ID NO: 1685 - DNA, 172 bp, Artificial Sequence; identical to SEQ ID NO: 1684
  Synthetic polynucleotide

SEQ ID NO: 1686 - DNA, 197 bp, Artificial Sequence
  Synthetic polynucleotide
atcatctcaccttgcctcctgcgcagcggttatgaagacctgcaggcccccgcccacgcacagacccccgcccacgcactcgcccccgcccacgcacgaccccccgcccacgcacctacccccgcccacgcacactcccccgcccacgcactgccccccgcccacgcacgtaggcgcgccatgcttcatcagactct

SEQ ID NO: 1687 - DNA, 197 bp, Artificial Sequence; identical to SEQ ID NO: 1686
  Synthetic polynucleotide

SEQ ID NO: 1688 - DNA, 197 bp, Artificial Sequence
  Synthetic polynucleotide
atcatctcaccttgcctcctggaacaccgtcgaattagcctgcaggaaagatgatgtcatcagaaaagatgatgtcatctcgaaagatgatgtcatcgacaaagatgatgtcatcctaaaagatgatgtcatcactaaagatgatgtcatctgcaaagatgatgtcatcgtaggcgcgccatgcttcatcagactct

SEQ ID NO: 1689 - DNA, 197 bp, Artificial Sequence; identical to SEQ ID NO: 1688
  Synthetic polynucleotide

SEQ ID NO: 1690 - DNA, 164 bp, Artificial Sequence
  Synthetic polynucleotide
atcatctcaccttgcctcctgactttaagccggatgtccctgcagggatgcgggtagagatgcgggttcggatgcgggtgacgatgcgggtctagatgcgggtactgatgcgggttgcgatgcgggtgtagatgcgggtggcgcgccatgcttcatcagactct

SEQ ID NO: 1691 - DNA, 164 bp, Artificial Sequence; identical to SEQ ID NO: 1690
  Synthetic polynucleotide

SEQ ID NO: 1692 - DNA, 156 bp, Artificial Sequence
  Synthetic polynucleotide
atcatctcaccttgcctcctgcgtaacgataagtccgacctgcagggaggaagtagagaggaagttcggaggaagtgacgaggaagtctagaggaagtactgaggaagttgcgaggaagtgtagaggaagtggcgcgccatgcttcatcagactct

SEQ ID NO: 1693 - DNA, 156 bp, Artificial Sequence; identical to SEQ ID NO: 1692
  Synthetic polynucleotide

SEQ ID NO: 1694 - DNA, 156 bp, Artificial Sequence
  Synthetic polynucleotide
atcatctcaccttgcctcctgctgtacccggagtactacctgcaggctaattaaagactaattaatcgctaattaagacctaattaactactaattaaactctaattaatgcctaattaagtactaattaaggcgcgccatgcttcatcagactct

SEQ ID NO: 1695 - DNA, 156 bp, Artificial Sequence; identical to SEQ ID NO: 1694
  Synthetic polynucleotide

SEQ ID NO: 1696 - DNA, 172 bp, Artificial Sequence
  Synthetic polynucleotide
atcatctcaccttgcctcctgttcttcagctttctacccctgcaggggccagacacagaggccagacactcgggccagacacgacggccagacacctaggccagacacactggccagacactgcggccagacacgtaggccagacacggcgcgccatgcttcatcagactct

SEQ ID NO: 1697 - DNA, 172 bp, Artificial Sequence; identical to SEQ ID NO: 1696
  Synthetic polynucleotide

SEQ ID NO: 1698 - DNA, 164 bp, Artificial Sequence
  Synthetic polynucleotide
atcatctcaccttgcctcctgggatctccctaatatgacctgcaggaccgattagagaaccgattagtcgaccgattaggacaccgattagctaaccgattagactaccgattagtgcaccgattaggtaaccgattagggcgcgccatgcttcatcagactct

SEQ ID NO: 1699 - DNA, 164 bp, Artificial Sequence; identical to SEQ ID NO: 1698
  Synthetic polynucleotide

SEQ ID NO: 1700 - DNA, 156 bp, Artificial Sequence
  Synthetic polynucleotide
atcatctcaccttgcctcctgttgcaggatgatggcatcctgcaggctaattacagactaattactcgctaattacgacctaattacctactaattacactctaattactgcctaattacgtactaattacggcgcgccatgcttcatcagactct

SEQ ID NO: 1701 - DNA, 156 bp, Artificial Sequence; identical to SEQ ID NO: 1700
  Synthetic polynucleotide

SEQ ID NO: 1702 - DNA, 148 bp, Artificial Sequence
  Synthetic polynucleotide
atcatctcaccttgcctcctgcaacgggttgacgactgcctgcagggtttgctagagtttgcttcggtttgctgacgtttgctctagtttgctactgtttgcttgcgtttgctgtagtttgctggcgcgccatgcttcatcagactct

SEQ ID NO: 1703 - DNA, 148 bp, Artificial Sequence; identical to SEQ ID NO: 1702
  Synthetic polynucleotide

SEQ ID NO: 1704 - DNA, 188 bp, Artificial Sequence
  Synthetic polynucleotide
atcatctcaccttgcctcctgcacgttctcaattgctgcctgcaggaaatttggcaaaagaaaatttggcaaatcgaaatttggcaaagacaaatttggcaaactaaaatttggcaaaactaaatttggcaaatgcaaatttggcaaagtaaaatttggcaaaggcgcgccatgcttcatcagactct

SEQ ID NO: 1705 - DNA, 188 bp, Artificial Sequence; identical to SEQ ID NO: 1704
  Synthetic polynucleotide

SEQ ID NO: 1706 - DNA, 156 bp, Artificial Sequence
  Synthetic polynucleotide
atcatctcaccttgcctcctgcgtgaggtagatctgcgcctgcaggctaattagagactaattagtcgctaattaggacctaattagctactaattagactctaattagtgcctaattaggtactaattagggcgcgccatgcttcatcagactct

SEQ ID NO: 1707 - DNA, 156 bp, Artificial Sequence; identical to SEQ ID NO: 1706
  Synthetic polynucleotide

SEQ ID NO: 1708 - DNA, 172 bp, Artificial Sequence
  Synthetic polynucleotide
atcatctcaccttgcctcctgtatgtcctttctcccatcctgcaggagcacttaagagaagcacttaagtcgagcacttaaggacagcacttaagctaagcacttaagactagcacttaagtgcagcacttaaggtaagcacttaagggcgcgccatgcttcatcagactct

SEQ ID NO: 1709 - DNA, 172 bp, Artificial Sequence; identical to SEQ ID NO: 1708
  Synthetic polynucleotide

SEQ ID NO: 1710 - DNA, 164 bp, Artificial Sequence
  Synthetic polynucleotide
atcatctcaccttgcctcctgcggactcgatggtcgtacctgcaggtgctaccgtagatgctaccgttcgtgctaccgtgactgctaccgtctatgctaccgtacttgctaccgttgctgctaccgtgtatgctaccgtggcgcgccatgcttcatcagactct

SEQ ID NO: 1711 - DNA, 164 bp, Artificial Sequence; identical to SEQ ID NO: 1710
  Synthetic polynucleotide

SEQ ID NO: 1712 - DNA, 156 bp, Artificial Sequence
  Synthetic polynucleotide
atcatctcaccttgcctcctgtgagtaatttcatccgtcctgcaggtttcggttagatttcggtttcgtttcggttgactttcggttctatttcggttacttttcggtttgctttcggttgtatttcggttggcgcgccatgcttcatcagactct

SEQ ID NO: 1713 - DNA, 156 bp, Artificial Sequence; identical to SEQ ID NO: 1712
  Synthetic polynucleotide

SEQ ID NO: 1714 - DNA, 190 bp, Artificial Sequence
  Synthetic polynucleotide
atcatctcaccttgcctcctggtagattccaaactgtccctgcaggttgaactttgccccagattgaactttgcccctcgttgaactttgccccgacttgaactttgccccctattgaactttgccccactttgaactttgcccctgcttgaactttgccccgtaggcgcgccatgcttcatcagactct

SEQ ID NO: 1715 - DNA, 190 bp, Artificial Sequence; identical to SEQ ID NO: 1714
  Synthetic polynucleotide

SEQ ID NO: 1716 - DNA, 197 bp, Artificial Sequence
  Synthetic polynucleotide
atcatctcaccttgcctcctgccaccgtatgctcacttcctgcaggagaaccttctagaagagaagaaccttctagaagtcgagaaccttctagaaggacagaaccttctagaagctaagaaccttctagaagactagaaccttctagaagtgcagaaccttctagaaggtaggcgcgccatgcttcatcagactct

SEQ ID NO: 1717 - DNA, 197 bp, Artificial Sequence; identical to SEQ ID NO: 1716
  Synthetic polynucleotide

SEQ ID NO: 1718 - DNA, 188 bp, Artificial Sequence
  Synthetic polynucleotide
atcatctcaccttgcctcctgctggatgcgtggtgaaccctgcaggaaaacgattataagaaaaacgattatatcgaaaacgattatagacaaaacgattatactaaaaacgattataactaaaacgattatatgcaaaacgattatagtaaaaacgattataggcgcgccatgcttcatcagactct

SEQ ID NO: 1719 - DNA, 188 bp, Artificial Sequence; identical to SEQ ID NO: 1718
  Synthetic polynucleotide

SEQ ID NO: 1720 - DNA, 156 bp, Artificial Sequence
  Synthetic polynucleotide
atcatctcaccttgcctcctgacacctatgatgctcgacctgcaggggattcccagaggattccctcgggattcccgacggattcccctaggattcccactggattccctgcggattcccgtaggattcccggcgcgccatgcttcatcagactct

SEQ ID NO: 1721 - DNA, 156 bp, Artificial Sequence; identical to SEQ ID NO: 1720
  Synthetic polynucleotide

SEQ ID NO: 1722 - DNA, 197 bp, Artificial Sequence
  Synthetic polynucleotide
atcatctcaccttgcctcctgtccattgaggacgagatcctgcagggccccgccccctcccagagccccgccccctccctcggccccgccccctcccgacgccccgccccctcccctagccccgccccctcccactgccccgccccctccctgcgccccgccccctcccgtaggcgcgccatgcttcatcagactct

SEQ ID NO: 1723 - DNA, 197 bp, Artificial Sequence; identical to SEQ ID NO: 1722
  Synthetic polynucleotide

SEQ ID NO: 1724 - DNA, 197 bp, Artificial Sequence
  Synthetic polynucleotide
atcatctcaccttgcctcctgacctcgaatcagtttcacctgcaggccaccagggggcgccagaccaccagggggcgcctcgccaccagggggcgccgacccaccagggggcgccctaccaccagggggcgccactccaccagggggcgcctgcccaccagggggcgccgtaggcgcgccatgcttcatcagactct

SEQ ID NO: 1725 - DNA, 197 bp, Artificial Sequence; identical to SEQ ID NO: 1724
  Synthetic polynucleotide

SEQ ID NO: 1726 - DNA, 190 bp, Artificial Sequence
  Synthetic polynucleotide
atcatctcaccttgcctcctgacgaaggctgctgtccacctgcaggtcctttcccttcctagatcctttcccttccttcgtcctttcccttcctgactcctttcccttcctctatcctttcccttcctacttcctttcccttccttgctcctttcccttcctgtaggcgcgccatgcttcatcagactct

SEQ ID NO: 1727 - DNA, 190 bp, Artificial Sequence; identical to SEQ ID NO: 1726
  Synthetic polynucleotide

SEQ ID NO: 1728 - DNA, 180 bp, Artificial Sequence
  Synthetic polynucleotide
atcatctcaccttgcctcctgcaacaagccaggagagtcctgcagggtacttccggtagagtacttccggttcggtacttccggtgacgtacttccggtctagtacttccggtactgtacttccggttgcgtacttccggtgtagtacttccggtggcgcgccatgcttcatcagactct

SEQ ID NO: 1729 - DNA, 180 bp, Artificial Sequence; identical to SEQ ID NO: 1728
  Synthetic polynucleotide

SEQ ID NO: 1730 - DNA, 172 bp, Artificial Sequence
  Synthetic polynucleotide
atcatctcaccttgcctcctgccgttaatccagttagccctgcaggggtcatgtggagaggtcatgtggtcgggtcatgtgggacggtcatgtggctaggtcatgtggactggtcatgtggtgcggtcatgtgggtaggtcatgtggggcgcgccatgcttcatcagactct

SEQ ID NO: 1731 - DNA, 172 bp, Artificial Sequence; identical to SEQ ID NO: 1730
  Synthetic polynucleotide

SEQ ID NO: 1732 - DNA, 180 bp, Artificial Sequence
  Synthetic polynucleotide
atcatctcaccttgcctcctgacttgacacgtgaaccccctgcaggaaaccacagacagaaaaccacagactcgaaaccacagacgacaaaccacagacctaaaaccacagacactaaaccacagactgcaaaccacagacgtaaaaccacagacggcgcgccatgcttcatcagactct

SEQ ID NO: 1733 - DNA, 180 bp, Artificial Sequence; identical to SEQ ID NO: 1732
  Synthetic polynucleotide

SEQ ID NO: 1734 - DNA, 188 bp, Artificial Sequence
  Synthetic polynucleotide
atcatctcaccttgcctcctgacactcctgcatcagggcctgcaggggttacgtaatcagaggttacgtaatctcgggttacgtaatcgacggttacgtaatcctaggttacgtaatcactggttacgtaatctgcggttacgtaatcgtaggttacgtaatcggcgcgccatgcttcatcagactct

SEQ ID NO: 1735 - DNA, 188 bp, Artificial Sequence; identical to SEQ ID NO: 1734
  Synthetic polynucleotide

SEQ ID NO: 1736 - DNA, 185 bp, Artificial Sequence
  Synthetic polynucleotide
atcatctcaccttgcctcctgggtcttaggtcgcagtacctgcaggggtaagtaaataaacaagaggtaagtaaataaacatcgggtaagtaaataaacagacggtaagtaaataaacactaggtaagtaaataaacaactggtaagtaaataaacatgcggcgcgccatgcttcatcagactct

SEQ ID NO: 1737 - DNA, 185 bp, Artificial Sequence; identical to SEQ ID NO: 1736
  Synthetic polynucleotide

SEQ ID NO: 1738 - DNA, 197 bp, Artificial Sequence
  Synthetic polynucleotide
atcatctcaccttgcctcctgttaccactacaagggctcctgcaggtgccctggggccatgagatgccctggggccatgtcgtgccctggggccatggactgccctggggccatgctatgccctggggccatgacttgccctggggccatgtgctgccctggggccatggtaggcgcgccatgcttcatcagactct

SEQ ID NO: 1739 - DNA, 197 bp, Artificial Sequence; identical to SEQ ID NO: 1738
  Synthetic polynucleotide

SEQ ID NO: 1740 - DNA, 191 bp, Artificial Sequence
  Synthetic polynucleotide
atcatctcaccttgcctcctgatactaatcgcgccagccctgcaggcaggagcagctgctgagagacaggagcagctgctgagtcgcaggagcagctgctgaggaccaggagcagctgctgagctacaggagcagctgctgagactcaggagcagctgctgagtgcggcgcgccatgcttcatcagactct

SEQ ID NO: 1741 - DNA, 191 bp, Artificial Sequence; identical to SEQ ID NO: 1740
  Synthetic polynucleotide

SEQ ID NO: 1742 - DNA, 186 bp, Artificial Sequence
  Synthetic polynucleotide
atcatctcaccttgcctcctgtccatacgaatccgggccctgcaggctccggcgccccctggtggcagactccggcgccccctggtggctcgctccggcgccccctggtggcgacctccggcgccccctggtggcctactccggcgccccctggtggcactggcgcgccatgcttcatcagactct

SEQ ID NO: 1743 - DNA, 186 bp, Artificial Sequence; identical to SEQ ID NO: 1742
  Synthetic polynucleotide

SEQ ID NO: 1744 - DNA, 172 bp, Artificial Sequence
  Synthetic polynucleotide
atcatctcaccttgcctcctgctggtagagttgccaatcctgcaggaatgtaaacaagaaatgtaaacatcgaatgtaaacagacaatgtaaacactaaatgtaaacaactaatgtaaacatgcaatgtaaacagtaaatgtaaacaggcgcgccatgcttcatcagactct

SEQ ID NO: 1745 - DNA, 172 bp, Artificial Sequence; identical to SEQ ID NO: 1744
  Synthetic polynucleotide

SEQ ID NO: 1746 - DNA, 197 bp, Artificial Sequence
  Synthetic polynucleotide
atcatctcaccttgcctcctgtggaggtagtccgataccctgcagggggaacattatgtcctaaagagggaacattatgtcctaatcggggaacattatgtcctaagacgggaacattatgtcctaactagggaacattatgtcctaaactgggaacattatgtcctaatgcggcgcgccatgcttcatcagactct

SEQ ID NO: 1747 - DNA, 197 bp, Artificial Sequence; identical to SEQ ID NO: 1746
  Synthetic polynucleotide

SEQ ID NO: 1748 - DNA, 188 bp, Artificial Sequence
  Synthetic polynucleotide
atcatctcaccttgcctcctgctttccgtcttgcacgacctgcaggccacctgagcccagaccacctgagccctcgccacctgagcccgacccacctgagcccctaccacctgagcccactccacctgagccctgcccacctgagcccgtaccacctgagcccggcgcgccatgcttcatcagactct

SEQ ID NO: 1749 - DNA, 188 bp, Artificial Sequence; identical to SEQ ID NO: 1748
  Synthetic polynucleotide

SEQ ID NO: 1750 - DNA, 172 bp, Artificial Sequence
  Synthetic polynucleotide
atcatctcaccttgcctcctgctttgttccaagcggctcctgcaggcctaattatcagacctaattatctcgcctaattatcgaccctaattatcctacctaattatcactcctaattatctgccctaattatcgtacctaattatcggcgcgccatgcttcatcagactct

SEQ ID NO: 1751 - DNA, 172 bp, Artificial Sequence; identical to SEQ ID NO: 1750
  Synthetic polynucleotide

SEQ ID NO: 1752 - DNA, 188 bp, Artificial Sequence
  Synthetic polynucleotide
atcatctcaccttgcctcctgagcaagtattcttcgcacctgcaggggggactttccaagaggggactttccatcgggggactttccagacggggactttccactaggggactttccaactggggactttccatgcggggactttccagtaggggactttccaggcgcgccatgcttcatcagactct

SEQ ID NO: 1753 - DNA, 188 bp, Artificial Sequence; identical to SEQ ID NO: 1752
  Synthetic polynucleotide

SEQ ID NO: 1754 - DNA, 188 bp, Artificial Sequence
  Synthetic polynucleotide
atcatctcaccttgcctcctgcagaagattgttggcagcctgcaggatatacttatttagaatatacttattttcgatatacttatttgacatatacttatttctaatatacttatttactatatacttattttgcatatacttatttgtaatatacttatttggcgcgccatgcttcatcagactct

SEQ ID NO: 1755 - DNA, 188 bp, Artificial Sequence; identical to SEQ ID NO: 1754
  Synthetic polynucleotide

SEQ ID NO: 1756 - DNA, 188 bp, Artificial Sequence
  Synthetic polynucleotide
atcatctcaccttgcctcctgtcaacggtgctcatatacctgcaggacaataacattgagaacaataacattgtcgacaataacattggacacaataacattgctaacaataacattgactacaataacattgtgcacaataacattggtaacaataacattgggcgcgccatgcttcatcagactct

SEQ ID NO: 1757 - DNA, 188 bp, Artificial Sequence; identical to SEQ ID NO: 1756
  Synthetic polynucleotide

SEQ ID NO: 1758 - DNA, 197 bp, Artificial Sequence
  Synthetic polynucleotide
atcatctcaccttgcctcctgggcctagcaagagaacacctgcaggtgatgacgtcaccttagatgatgacgtcacctttcgtgatgacgtcaccttgactgatgacgtcaccttctatgatgacgtcaccttacttgatgacgtcacctttgctgatgacgtcaccttgtaggcgcgccatgcttcatcagactct

SEQ ID NO: 1759 - DNA, 197 bp, Artificial Sequence; identical to SEQ ID NO: 1758
  Synthetic polynucleotide

SEQ ID NO: 1760 - DNA, 197 bp, Artificial Sequence
  Synthetic polynucleotide
atcatctcaccttgcctcctgcgatcgataagctcttacctgcaggggttaataattaaccagaggttaataattaacctcgggttaataattaaccgacggttaataattaaccctaggttaataattaaccactggttaataattaacctgcggttaataattaaccgtaggcgcgccatgcttcatcagactct

SEQ ID NO: 1761 - DNA, 197 bp, Artificial Sequence; identical to SEQ ID NO: 1760
  Synthetic polynucleotide

SEQ ID NO: 1762 - DNA, 191 bp, Artificial Sequence
  Synthetic polynucleotide
atcatctcaccttgcctcctgcaataaggcacgccatacctgcaggtgaactaattagcccacagatgaactaattagcccactcgtgaactaattagcccacgactgaactaattagcccacctatgaactaattagcccacacttgaactaattagcccactgcggcgcgccatgcttcatcagactct

SEQ ID NO: 1763 - DNA, 191 bp, Artificial Sequence; identical to SEQ ID NO: 1762
  Synthetic polynucleotide

SEQ ID NO: 1764 - DNA, 164 bp, Artificial Sequence
  Synthetic polynucleotide
atcatctcaccttgcctcctggaacggcgcagcaaactcctgcaggcctaattggagacctaattggtcgcctaattgggaccctaattggctacctaattggactcctaattggtgccctaattgggtacctaattggggcgcgccatgcttcatcagactct

SEQ ID NO: 1765 - DNA, 164 bp, Artificial Sequence; identical to SEQ ID NO: 1764
  Synthetic polynucleotide

SEQ ID NO: 1766 - DNA, 185 bp, Artificial Sequence
  Synthetic polynucleotide
atcatctcaccttgcctcctggagctacgccgtaagctcctgcaggaacggtaataaaatttagaaacggtaataaaattttcgaacggtaataaaatttgacaacggtaataaaatttctaaacggtaataaaatttactaacggtaataaaattttgcggcgcgccatgcttcatcagactct

SEQ ID NO: 1767 - DNA, 185 bp, Artificial Sequence; identical to SEQ ID NO: 1766
  Synthetic polynucleotide

SEQ ID NO: 1768 - DNA, 156 bp, Artificial Sequence
  Synthetic polynucleotide
atcatctcaccttgcctcctgtttacgcgttcacgctacctgcaggctaatcaaagactaatcaatcgctaatcaagacctaatcaactactaatcaaactctaatcaatgcctaatcaagtactaatcaaggcgcgccatgcttcatcagactct

SEQ ID NO: 1769 - DNA, 156 bp, Artificial Sequence; identical to SEQ ID NO: 1768
  Synthetic polynucleotide

SEQ ID NO: 1770 - DNA, 180 bp, Artificial Sequence
  Synthetic polynucleotide
atcatctcaccttgcctcctgataggctgcatgtgcctcctgcaggagagtgggtgtagaagagtgggtgttcgagagtgggtgtgacagagtgggtgtctaagagtgggtgtactagagtgggtgttgcagagtgggtgtgtaagagtgggtgtggcgcgccatgcttcatcagactct

SEQ ID NO: 1771 - DNA, 180 bp, Artificial Sequence; identical to SEQ ID NO: 1770
  Synthetic polynucleotide

SEQ ID NO: 1772 - DNA, 156 bp, Artificial Sequence
  Synthetic polynucleotide
atcatctcaccttgcctcctgtgtttcgctgcactttacctgcagggctgtcaaagagctgtcaatcggctgtcaagacgctgtcaactagctgtcaaactgctgtcaatgcgctgtcaagtagctgtcaaggcgcgccatgcttcatcagactct

SEQ ID NO: 1773 - DNA, 156 bp, Artificial Sequence; identical to SEQ ID NO: 1772
  Synthetic polynucleotide

SEQ ID NO: 1774 - DNA, 197 bp, Artificial Sequence
  Synthetic polynucleotide
atcatctcaccttgcctcctgggtgacgagcgactatacctgcagggttaagggattaaagagagttaagggattaaagtcggttaagggattaaaggacgttaagggattaaagctagttaagggattaaagactgttaagggattaaagtgcgttaagggattaaaggtaggcgcgccatgcttcatcagactct

SEQ ID NO: 1775 - DNA, 197 bp, Artificial Sequence; identical to SEQ ID NO: 1774
  Synthetic polynucleotide

SEQ ID NO: 1776 - DNA, 196 bp, Artificial Sequence
  Synthetic polynucleotide
atcatctcaccttgcctcctgggagaaagcagtcgtgtcctgcaggttcagcaccatggacagcgcccagattcagcaccatggacagcgccctcgttcagcaccatggacagcgcccgacttcagcaccatggacagcgcccctattcagcaccatggacagcgcccactggcgcgccatgcttcatcagactct

SEQ ID NO: 1777 - DNA, 196 bp, Artificial Sequence; identical to SEQ ID NO: 1776
  Synthetic polynucleotide

SEQ ID NO: 1778 - DNA, 156 bp, Artificial Sequence
  Synthetic polynucleotide
atcatctcaccttgcctcctgcttagttcctacttcctcctgcagggcgtgactagagcgtgacttcggcgtgactgacgcgtgactctagcgtgactactgcgtgacttgcgcgtgactgtagcgtgactggcgcgccatgcttcatcagactct

SEQ ID NO: 1779 - DNA, 156 bp, Artificial Sequence; identical to SEQ ID NO: 1778
  Synthetic polynucleotide

SEQ ID NO: 1780 - DNA, 164 bp, Artificial Sequence
  Synthetic polynucleotide
atcatctcaccttgcctcctgtgaggaggagactgattcctgcaggtgatgacgtagatgatgacgttcgtgatgacgtgactgatgacgtctatgatgacgtacttgatgacgttgctgatgacgtgtatgatgacgtggcgcgccatgcttcatcagactct

SEQ ID NO: 1781 - DNA, 164 bp, Artificial Sequence; identical to SEQ ID NO: 1780
  Synthetic polynucleotide

SEQ ID NO: 1782 - DNA, 164 bp, Artificial Sequence
  Synthetic polynucleotide
atcatctcaccttgcctcctgtggctatgtactgattccctgcaggctcattaggagactcattaggtcgctcattagggacctcattaggctactcattaggactctcattaggtgcctcattagggtactcattaggggcgcgccatgcttcatcagactct

SEQ ID NO: 1783 - DNA, 164 bp, Artificial Sequence; identical to SEQ ID NO: 1782
  Synthetic polynucleotide

SEQ ID NO: 1784 - DNA, 190 bp, Artificial Sequence
  Synthetic polynucleotide
atcatctcaccttgcctcctggtgctgtgacaacacgccctgcaggtgaccacgtggtcgagatgaccacgtggtcgtcgtgaccacgtggtcggactgaccacgtggtcgctatgaccacgtggtcgacttgaccacgtggtcgtgctgaccacgtggtcggtaggcgcgccatgcttcatcagactct

SEQ ID NO: 1785 - DNA, 190 bp, Artificial Sequence; identical to SEQ ID NO: 1784
  Synthetic polynucleotide

SEQ ID NO: 1786 - DNA, 183 bp, Artificial Sequence
  Synthetic polynucleotide
atcatctcaccttgcctcctgcatctggtcacccactccctgcagggtcgcttctcacacctctgatggcaagagtcgcttctcacacctctgatggcatcggtcgcttctcacacctctgatggcagacgtcgcttctcacacctctgatggcactaggcgcgccatgcttcatcagactct

SEQ ID NO: 1787 - DNA, 183 bp, Artificial Sequence; identical to SEQ ID NO: 1786
  Synthetic polynucleotide

SEQ ID NO: 1788 - DNA, 196 bp, Artificial Sequence
  Synthetic polynucleotide
atcatctcaccttgcctcctgacacgtgcatagtacctcctgcaggacctcattacgagagaacctcattacgagtcgacctcattacgaggacacctcattacgagctaacctcattacgagactacctcattacgagtgcacctcattacgaggtaacctcattacgagggcgcgccatgcttcatcagactct

SEQ ID NO: 1789 - DNA, 196 bp, Artificial Sequence; identical to SEQ ID NO: 1788
  Synthetic polynucleotide

SEQ ID NO: 1790 - DNA, 185 bp, Artificial Sequence
  Synthetic polynucleotide
atcatctcaccttgcctcctgcctggttaaatggcccacctgcaggggggaatttccccgccagaggggaatttccccgcctcgggggaatttccccgccgacggggaatttccccgccctaggggaatttccccgccactggggaatttccccgcctgcggcgcgccatgcttcatcagactct

SEQ ID NO: 1791 - DNA, 185 bp, Artificial Sequence; identical to SEQ ID NO: 1790
  Synthetic polynucleotide

SEQ ID NO: 1792 - DNA, 172 bp, Artificial Sequence
  Synthetic polynucleotide
atcatctcaccttgcctcctggcgtctgtttaaccctccctgcaggtacgcgcgtaagatacgcgcgtatcgtacgcgcgtagactacgcgcgtactatacgcgcgtaacttacgcgcgtatgctacgcgcgtagtatacgcgcgtaggcgcgccatgcttcatcagactct

SEQ ID NO: 1793 - DNA, 172 bp, Artificial Sequence; identical to SEQ ID NO: 1792
  Synthetic polynucleotide

SEQ ID NO: 1794 - DNA, 148 bp, Artificial Sequence
  Synthetic polynucleotide
atcatctcaccttgcctcctggattgtaaggaggtgtgcctgcaggatatattagaatatatttcgatatattgacatatattctaatatattactatatatttgcatatattgtaatatattggcgcgccatgcttcatcagactct

SEQ ID NO: 1795 - DNA, 148 bp, Artificial Sequence; identical to SEQ ID NO: 1794
  Synthetic polynucleotide

SEQ ID NO: 1796 - DNA, 132 bp, Artificial Sequence
  Synthetic polynucleotide
atcatctcaccttgcctcctgattagatgggttatctccctgcaggtgtcaagatgtcatcgtgtcagactgtcactatgtcaacttgtcatgctgtcagtatgtcaggcgcgccatgcttcatcagactct

SEQ ID NO: 1797 - DNA, 132 bp, Artificial Sequence; identical to SEQ ID NO: 1796
  Synthetic polynucleotide

SEQ ID NO: 1798 - DNA, 164 bp, Artificial Sequence
  Synthetic polynucleotide
atcatctcaccttgcctcctgcccttgaagtcctgattcctgcaggtgtacgtcaagatgtacgtcatcgtgtacgtcagactgtacgtcactatgtacgtcaacttgtacgtcatgctgtacgtcagtatgtacgtcaggcgcgccatgcttcatcagactct

SEQ ID NO: 1799 - DNA, 164 bp, Artificial Sequence; identical to SEQ ID NO: 1798
  Synthetic polynucleotide

SEQ ID NO: 1800 - DNA, 190 bp, Artificial Sequence
  Synthetic polynucleotide
atcatctcaccttgcctcctggcgctgactgcatcatccctgcaggtgtatgtttatattagatgtatgtttatatttcgtgtatgtttatattgactgtatgtttatattctatgtatgtttatattacttgtatgtttatatttgctgtatgtttatattgtaggcgcgccatgcttcatcagactct

SEQ ID NO: 1801 - DNA, 190 bp, Artificial Sequence; identical to SEQ ID NO: 1800
  Synthetic polynucleotide

SEQ ID NO: 1802 - DNA, 190 bp, Artificial Sequence
  Synthetic polynucleotide
atcatctcaccttgcctcctgcgacactgcacctatgccctgcaggggggtcaaaggtcaagaggggtcaaaggtcatcgggggtcaaaggtcagacggggtcaaaggtcactaggggtcaaaggtcaactggggtcaaaggtcatgcggggtcaaaggtcagtaggcgcgccatgcttcatcagactct

SEQ ID NO: 1803 - DNA, 190 bp, Artificial Sequence; identical to SEQ ID NO: 1802
  Synthetic polynucleotide

SEQ ID NO: 1804 - DNA, 191 bp, Artificial Sequence
  Synthetic polynucleotide
atcatctcaccttgcctcctgtccacccttcgtcatcgcctgcagggccaattaattaatgcgagagccaattaattaatgcgtcggccaattaattaatgcggacgccaattaattaatgcgctagccaattaattaatgcgactgccaattaattaatgcgtgcggcgcgccatgcttcatcagactct

SEQ ID NO: 1805 - DNA, 191 bp, Artificial Sequence; identical to SEQ ID NO: 1804
  Synthetic polynucleotide

SEQ ID NO: 1806 - DNA, 197 bp, Artificial Sequence
  Synthetic polynucleotide
atcatctcaccttgcctcctgagactctactccactcgcctgcaggcattgttatgcaaatagacattgttatgcaaattcgcattgttatgcaaatgaccattgttatgcaaatctacattgttatgcaaatactcattgttatgcaaattgccattgttatgcaaatgtaggcgcgccatgcttcatcagactct

SEQ ID NO: 1807 - DNA, 197 bp, Artificial Sequence; identical to SEQ ID NO: 1806
  Synthetic polynucleotide

SEQ ID NO: 1808 - DNA, 156 bp, Artificial Sequence
  Synthetic polynucleotide
atcatctcaccttgcctcctggattggttagtgcccgtcctgcaggctaattatagactaattattcgctaattatgacctaattatctactaattatactctaattattgcctaattatgtactaattatggcgcgccatgcttcatcagactct

SEQ ID NO: 1809 - DNA, 156 bp, Artificial Sequence; identical to SEQ ID NO: 1808
  Synthetic polynucleotide

SEQ ID NO: 1810 - DNA, 156 bp, Artificial Sequence
  Synthetic polynucleotide
atcatctcaccttgcctcctgcctgaacgatgaccatccctgcagggggaatccagagggaatcctcggggaatccgacgggaatccctagggaatccactgggaatcctgcgggaatccgtagggaatccggcgcgccatgcttcatcagactct

SEQ ID NO: 1811 - DNA, 156 bp, Artificial Sequence; identical to SEQ ID NO: 1810
  Synthetic polynucleotide

SEQ ID NO: 1812 - DNA, 197 bp, Artificial Sequence
  Synthetic polynucleotide
atcatctcaccttgcctcctgtggcattggttactcttcctgcagggccggatgtacttccggtagagccggatgtacttccggttcggccggatgtacttccggtgacgccggatgtacttccggtctagccggatgtacttccggtactgccggatgtacttccggttgcggcgcgccatgcttcatcagactct

SEQ ID NO: 1813 - DNA, 197 bp, Artificial Sequence; identical to SEQ ID NO: 1812
  Synthetic polynucleotide

SEQ ID NO: 1814 - DNA, 196 bp, Artificial Sequence
  Synthetic polynucleotide
atcatctcaccttgcctcctggctggttgtatatcgctcctgcaggtgtggttctaaaaatagaacaaagatgtggttctaaaaatagaacaatcgtgtggttctaaaaatagaacaagactgtggttctaaaaatagaacaactatgtggttctaaaaatagaacaaactggcgcgccatgcttcatcagactct

SEQ ID NO: 1815 - DNA, 196 bp, Artificial Sequence; identical to SEQ ID NO: 1814
  Synthetic polynucleotide

SEQ ID NO: 1816 - DNA, 180 bp, Artificial Sequence
  Synthetic polynucleotide
atcatctcaccttgcctcctgcatagtattgctcggatcctgcaggttctgacagctagattctgacagcttcgttctgacagctgacttctgacagctctattctgacagctactttctgacagcttgcttctgacagctgtattctgacagctggcgcgccatgcttcatcagactct

SEQ ID NO: 1817 - DNA, 180 bp, Artificial Sequence; identical to SEQ ID NO: 1816
  Synthetic polynucleotide

SEQ ID NO: 1818 - DNA, 180 bp, Artificial Sequence
  Synthetic polynucleotide
atcatctcaccttgcctcctggagtcgcacacagaagccctgcagggggataatcccagagggataatccctcggggataatcccgacgggataatcccctagggataatcccactgggataatccctgcgggataatcccgtagggataatcccggcgcgccatgcttcatcagactct

SEQ ID NO: 1819 - DNA, 180 bp, Artificial Sequence; identical to SEQ ID NO: 1818
  Synthetic polynucleotide

SEQ ID NO: 1820 - DNA, 164 bp, Artificial Sequence
  Synthetic polynucleotide
atcatctcaccttgcctcctgacaagatatgtgatcctcctgcaggtgtaactgtagatgtaactgttcgtgtaactgtgactgtaactgtctatgtaactgtacttgtaactgttgctgtaactgtgtatgtaactgtggcgcgccatgcttcatcagactct

SEQ ID NO: 1821 - DNA, 164 bp, Artificial Sequence; identical to SEQ ID NO: 1820
  Synthetic polynucleotide

SEQ ID NO: 1822 - DNA, 190 bp, Artificial Sequence
  Synthetic polynucleotide
atcatctcaccttgcctcctggatctacaaggcggaaacctgcagggctataaatagaacagagctataaatagaactcggctataaatagaacgacgctataaatagaacctagctataaatagaacactgctataaatagaactgcgctataaatagaacgtaggcgcgccatgcttcatcagactct

SEQ ID NO: 1823 - DNA, 190 bp, Artificial Sequence; identical to SEQ ID NO: 1822
  Synthetic polynucleotide

SEQ ID NO: 1824 - DNA, 172 bp, Artificial Sequence
  Synthetic polynucleotide
atcatctcaccttgcctcctgccatatgctcgtacgaccctgcaggtgacccaattagatgacccaatttcgtgacccaattgactgacccaattctatgacccaattacttgacccaatttgctgacccaattgtatgacccaattggcgcgccatgcttcatcagactct

SEQ ID NO: 1825 - DNA, 172 bp, Artificial Sequence; identical to SEQ ID NO: 1824
  Synthetic polynucleotide

SEQ ID NO: 1826 - DNA, 196 bp, Artificial Sequence
  Synthetic polynucleotide
atcatctcaccttgcctcctggggacaccacttaatttcctgcaggcattgtttatatgagacattgtttatatgtcgcattgtttatatggaccattgtttatatgctacattgtttatatgactcattgtttatatgtgccattgtttatatggtacattgtttatatgggcgcgccatgcttcatcagactct

SEQ ID NO: 1827 - DNA, 196 bp, Artificial Sequence; identical to SEQ ID NO: 1826
  Synthetic polynucleotide

SEQ ID NO: 1828 - DNA, 156 bp, Artificial Sequence
  Synthetic polynucleotide
atcatctcaccttgcctcctgcctttaaacgctacagtcctgcaggtatttataagatatttatatcgtatttatagactatttatactatatttataacttatttatatgctatttatagtatatttataggcgcgccatgcttcatcagactct

SEQ ID NO: 1829 - DNA, 156 bp, Artificial Sequence; identical to SEQ ID NO: 1828
  Synthetic polynucleotide

SEQ ID NO: 1830 - DNA, 197 bp, Artificial Sequence
  Synthetic polynucleotide
atcatctcaccttgcctcctgccgatgcgagtccaaatcctgcaggtggtaatcattaaccagatggtaatcattaacctcgtggtaatcattaaccgactggtaatcattaaccctatggtaatcattaaccacttggtaatcattaacctgctggtaatcattaaccgtaggcgcgccatgcttcatcagactct

SEQ ID NO: 1831 - DNA, 197 bp, Artificial Sequence; identical to SEQ ID NO: 1830
  Synthetic polynucleotide

SEQ ID NO: 1832 - DNA, 172 bp, Artificial Sequence
  Synthetic polynucleotide
atcatctcaccttgcctcctggtgtgtgtgtattgcctcctgcagggaggggatttagagaggggattttcggaggggatttgacgaggggatttctagaggggatttactgaggggattttgcgaggggatttgtagaggggatttggcgcgccatgcttcatcagactct

SEQ ID NO: 1833 - DNA, 172 bp, Artificial Sequence; identical to SEQ ID NO: 1832
  Synthetic polynucleotide

SEQ ID NO: 1834 - DNA, 197 bp, Artificial Sequence
  Synthetic polynucleotide
atcatctcaccttgcctcctggtgcttaggcttgtaaacctgcaggttgcggtttttgcggttaagattgcggtttttgcggttatcgttgcggtttttgcggttagacttgcggtttttgcggttactattgcggtttttgcggttaactttgcggtttttgcggttatgcggcgcgccatgcttcatcagactct

SEQ ID NO: 1835 - DNA, 197 bp, Artificial Sequence; identical to SEQ ID NO: 1834
  Synthetic polynucleotide

SEQ ID NO: 1836 - DNA, 172 bp, Artificial Sequence
  Synthetic polynucleotide
atcatctcaccttgcctcctgcggagcgtattgatgcgcctgcaggaaccacttaaagaaaccacttaatcgaaccacttaagacaaccacttaactaaaccacttaaactaaccacttaatgcaaccacttaagtaaaccacttaaggcgcgccatgcttcatcagactct

SEQ ID NO: 1837 - DNA, 172 bp, Artificial Sequence; identical to SEQ ID NO: 1836
  Synthetic polynucleotide

SEQ ID NO: 1838 - DNA, 188 bp, Artificial Sequence
  Synthetic polynucleotide
atcatctcaccttgcctcctgtaccgatgatctcttagcctgcagggaaagtgaaagtagagaaagtgaaagttcggaaagtgaaagtgacgaaagtgaaagtctagaaagtgaaagtactgaaagtgaaagttgcgaaagtgaaagtgtagaaagtgaaagtggcgcgccatgcttcatcagactct

SEQ ID NO: 1839 - DNA, 188 bp, Artificial Sequence; identical to SEQ ID NO: 1838
  Synthetic polynucleotide

SEQ ID NO: 1840 - DNA, 197 bp, Artificial Sequence
  Synthetic polynucleotide
atcatctcaccttgcctcctgtaactctcgcaatcctccctgcaggcctagcaacaggtgaagacctagcaacaggtgatcgcctagcaacaggtgagaccctagcaacaggtgactacctagcaacaggtgaactcctagcaacaggtgatgccctagcaacaggtgagtaggcgcgccatgcttcatcagactct

SEQ ID NO: 1841 - DNA, 197 bp, Artificial Sequence; identical to SEQ ID NO: 1840
  Synthetic polynucleotide

SEQ ID NO: 1842 - DNA, 191 bp, Artificial Sequence
  Synthetic polynucleotide
atcatctcaccttgcctcctggcacacaattctgcacacctgcaggcaaagctaattagtttaagacaaagctaattagtttatcgcaaagctaattagtttagaccaaagctaattagtttactacaaagctaattagtttaactcaaagctaattagtttatgcggcgcgccatgcttcatcagactct

SEQ ID NO: 1843 - DNA, 191 bp, Artificial Sequence; identical to SEQ ID NO: 1842
  Synthetic polynucleotide

SEQ ID NO: 1844 - DNA, 172 bp, Artificial Sequence
  Synthetic polynucleotide
atcatctcaccttgcctcctgatgtgggccgaaggacacctgcaggattaacataaagaattaacataatcgattaacataagacattaacataactaattaacataaactattaacataatgcattaacataagtaattaacataaggcgcgccatgcttcatcagactct

SEQ ID NO: 1845 - DNA, 172 bp, Artificial Sequence; identical to SEQ ID NO: 1844
  Synthetic polynucleotide

SEQ ID NO: 1846 - DNA, 156 bp, Artificial Sequence
  Synthetic polynucleotide
atcatctcaccttgcctcctgcttccttacggttcccgcctgcaggccataaatagaccataaattcgccataaatgacccataaatctaccataaatactccataaattgcccataaatgtaccataaatggcgcgccatgcttcatcagactct

SEQ ID NO: 1847 - DNA, 156 bp, Artificial Sequence; identical to SEQ ID NO: 1846
  Synthetic polynucleotide

SEQ ID NO: 1848 - DNA, 156 bp, Artificial Sequence
  Synthetic polynucleotide
atcatctcaccttgcctcctgtagttgaggaaccgactcctgcaggctaatcccagactaatccctcgctaatcccgacctaatcccctactaatcccactctaatccctgcctaatcccgtactaatcccggcgcgccatgcttcatcagactct

SEQ ID NO: 1849 - DNA, 156 bp, Artificial Sequence; identical to SEQ ID NO: 1848
  Synthetic polynucleotide

SEQ ID NO: 1850 - DNA, 196 bp, Artificial Sequence
  Synthetic polynucleotide
atcatctcaccttgcctcctggcggtctagttcgaatccctgcaggtccggtgctaaaaatagcacctagatccggtgctaaaaatagcaccttcgtccggtgctaaaaatagcacctgactccggtgctaaaaatagcacctctatccggtgctaaaaatagcacctactggcgcgccatgcttcatcagactct

SEQ ID NO: 1851 - DNA, 196 bp, Artificial Sequence; identical to SEQ ID NO: 1850
  Synthetic polynucleotide

SEQ ID NO: 1852 - DNA, 164 bp, Artificial Sequence
  Synthetic polynucleotide
atcatctcaccttgcctcctgtgcaccactacggtattcctgcaggccgtaattgagaccgtaattgtcgccgtaattggacccgtaattgctaccgtaattgactccgtaattgtgcccgtaattggtaccgtaattgggcgcgccatgcttcatcagactct

SEQ ID NO: 1853 - DNA, 164 bp, Artificial Sequence; identical to SEQ ID NO: 1852
  Synthetic polynucleotide

SEQ ID NO: 1854 - DNA, 156 bp, Artificial Sequence
  Synthetic polynucleotide
atcatctcaccttgcctcctgtagttgacttgactaaccctgcagggcaattaaagagcaattaatcggcaattaagacgcaattaactagcaattaaactgcaattaatgcgcaattaagtagcaattaaggcgcgccatgcttcatcagactct

SEQ ID NO: 1855 - DNA, 156 bp, Artificial Sequence; identical to SEQ ID NO: 1854
  Synthetic polynucleotide

SEQ ID NO: 1856 - DNA, 164 bp, Artificial Sequence
  Synthetic polynucleotide
atcatctcaccttgcctcctgggtgttcctcatggtctcctgcaggaggcaggaaagaaggcaggaatcgaggcaggaagacaggcaggaactaaggcaggaaactaggcaggaatgcaggcaggaagtaaggcaggaaggcgcgccatgcttcatcagactct

SEQ ID NO: 1857 - DNA, 164 bp, Artificial Sequence; identical to SEQ ID NO: 1856
  Synthetic polynucleotide

SEQ ID NO: 1858 - DNA, 148 bp, Artificial Sequence
  Synthetic polynucleotide
atcatctcaccttgcctcctgagcactgttcccagtgacctgcaggtttatacagatttatactcgtttatacgactttatacctatttatacacttttatactgctttatacgtatttatacggcgcgccatgcttcatcagactct

SEQ ID NO: 1859 - DNA, 148 bp, Artificial Sequence; identical to SEQ ID NO: 1858
  Synthetic polynucleotide

SEQ ID NO: 1860 - DNA, 172 bp, Artificial Sequence
  Synthetic polynucleotide
atcatctcaccttgcctcctgtgcgactcgtaggcttacctgcagggaccccccggagagaccccccggtcggaccccccgggacgaccccccggctagaccccccggactgaccccccggtgcgaccccccgggtagaccccccggggcgcgccatgcttcatcagactct

SEQ ID NO: 1861 - DNA, 172 bp, Artificial Sequence; identical to SEQ ID NO: 1860
  Synthetic polynucleotide

SEQ ID NO: 1862 - DNA, 156 bp, Artificial Sequence
  Synthetic polynucleotide
atcatctcaccttgcctcctgctaagttgaggcctgggcctgcaggccggaaatagaccggaaattcgccggaaatgacccggaaatctaccggaaatactccggaaattgcccggaaatgtaccggaaatggcgcgccatgcttcatcagactct

SEQ ID NO: 1863 - DNA, 156 bp, Artificial Sequence; identical to SEQ ID NO: 1862
  Synthetic polynucleotide

SEQ ID NO: 1864 - DNA, 164 bp, Artificial Sequence
  Synthetic polynucleotide
atcatctcaccttgcctcctggcgtgatctggataccacctgcaggattgcgaaaagaattgcgaaatcgattgcgaaagacattgcgaaactaattgcgaaaactattgcgaaatgcattgcgaaagtaattgcgaaaggcgcgccatgcttcatcagactct

SEQ ID NO: 1865 - DNA, 164 bp, Artificial Sequence; identical to SEQ ID NO: 1864
  Synthetic polynucleotide

SEQ ID NO: 1866 - DNA, 196 bp, Artificial Sequence
  Synthetic polynucleotide
atcatctcaccttgcctcctgctgagagtcgagtaaaccctgcaggtgatgacgtggcaagatgatgacgtggcatcgtgatgacgtggcagactgatgacgtggcactatgatgacgtggcaacttgatgacgtggcatgctgatgacgtggcagtatgatgacgtggcaggcgcgccatgcttcatcagactct

SEQ ID NO: 1867 - DNA, 196 bp, Artificial Sequence; identical to SEQ ID NO: 1866
  Synthetic polynucleotide

SEQ ID NO: 1868 - DNA, 156 bp, Artificial Sequence
  Synthetic polynucleotide
atcatctcaccttgcctcctgtgacccagagggtagtgcctgcaggctaatcctagactaatccttcgctaatcctgacctaatcctctactaatcctactctaatccttgcctaatcctgtactaatcctggcgcgccatgcttcatcagactct

SEQ ID NO: 1869 - DNA, 156 bp, Artificial Sequence; identical to SEQ ID NO: 1868
  Synthetic polynucleotide

SEQ ID NO: 1870 - DNA, 172 bp, Artificial Sequence
  Synthetic polynucleotide
atcatctcaccttgcctcctgatgggtagctgctggtccctgcaggcgcagctgtgagacgcagctgtgtcgcgcagctgtggaccgcagctgtgctacgcagctgtgactcgcagctgtgtgccgcagctgtggtacgcagctgtgggcgcgccatgcttcatcagactct

SEQ ID NO: 1871 - DNA, 172 bp, Artificial Sequence; identical to SEQ ID NO: 1870
  Synthetic polynucleotide

SEQ ID NO: 1872 - DNA, 164 bp, Artificial Sequence
  Synthetic polynucleotide
atcatctcaccttgcctcctgctaggactccagctagccctgcaggaacagctgaagaaacagctgatcgaacagctgagacaacagctgactaaacagctgaactaacagctgatgcaacagctgagtaaacagctgaggcgcgccatgcttcatcagactct

SEQ ID NO: 1873 - DNA, 164 bp, Artificial Sequence; identical to SEQ ID NO: 1872
  Synthetic polynucleotide

SEQ ID NO: 1874 - DNA, 190 bp, Artificial Sequence
  Synthetic polynucleotide
atcatctcaccttgcctcctggcctgggattcaaataccctgcagggcaccagggacagcagagcaccagggacagctcggcaccagggacagcgacgcaccagggacagcctagcaccagggacagcactgcaccagggacagctgcgcaccagggacagcgtaggcgcgccatgcttcatcagactct

SEQ ID NO: 1875 - DNA, 190 bp, Artificial Sequence; identical to SEQ ID NO: 1874
  Synthetic polynucleotide

SEQ ID NO: 1876 - DNA, 196 bp, Artificial Sequence
  Synthetic polynucleotide
atcatctcaccttgcctcctgactgcggtattatgtcccctgcaggtgttacgtaaataagatgttacgtaaatatcgtgttacgtaaatagactgttacgtaaatactatgttacgtaaataacttgttacgtaaatatgctgttacgtaaatagtatgttacgtaaataggcgcgccatgcttcatcagactct

SEQ ID NO: 1877 - DNA, 196 bp, Artificial Sequence; identical to SEQ ID NO: 1876
  Synthetic polynucleotide

SEQ ID NO: 1878 - DNA, 172 bp, Artificial Sequence
  Synthetic polynucleotide
atcatctcaccttgcctcctggtctaagtctgtcaccacctgcagggcgggcggggagagcgggcggggtcggcgggcgggggacgcgggcggggctagcgggcggggactgcgggcggggtgcgcgggcgggggtagcgggcggggggcgcgccatgcttcatcagactct

SEQ ID NO: 1879 - DNA, 172 bp, Artificial Sequence; identical to SEQ ID NO: 1878
  Synthetic polynucleotide

SEQ ID NO: 1880 - DNA, 148 bp, Artificial Sequence
  Synthetic polynucleotide
atcatctcaccttgcctcctgatcgatgattagcgcagcctgcaggaatgataagaaatgatatcgaatgatagacaatgatactaaatgataactaatgatatgcaatgatagtaaatgataggcgcgccatgcttcatcagactct

SEQ ID NO: 1881 - DNA, 148 bp, Artificial Sequence; identical to SEQ ID NO: 1880
  Synthetic polynucleotide

SEQ ID NO: 1882 - DNA, 185 bp, Artificial Sequence
  Synthetic polynucleotide
atcatctcaccttgcctcctggaggatggactgcaggtcctgcagggaattaattggttgttagagaattaattggttgtttcggaattaattggttgttgacgaattaattggttgttctagaattaattggttgttactgaattaattggttgtttgcggcgcgccatgcttcatcagactct

SEQ ID NO: 1883 - DNA, 185 bp, Artificial Sequence; identical to SEQ ID NO: 1882
  Synthetic polynucleotide

SEQ ID NO: 1884 - DNA, 148 bp, Artificial Sequence
  Synthetic polynucleotide
atcatctcaccttgcctcctgttagagcctagttgatgcctgcaggtttatatagatttatattcgtttatatgactttatatctatttatatacttttatattgctttatatgtatttatatggcgcgccatgcttcatcagactct

SEQ ID NO: 1885 - DNA, 148 bp, Artificial Sequence; identical to SEQ ID NO: 1884
  Synthetic polynucleotide

SEQ ID NO: 1886 - DNA, 185 bp, Artificial Sequence
  Synthetic polynucleotide
atcatctcaccttgcctcctgggagtagtcattccagccctgcaggagataagataagataaagaagataagataagataatcgagataagataagataagacagataagataagataactaagataagataagataaactagataagataagataatgcggcgcgccatgcttcatcagactct

SEQ ID NO: 1887 - DNA, 185 bp, Artificial Sequence; identical to SEQ ID NO: 1886
  Synthetic polynucleotide

SEQ ID NO: 1888 - DNA, 188 bp, Artificial Sequence
  Synthetic polynucleotide
atcatctcaccttgcctcctgacgtgtcttgacgaatccctgcaggtgggcgggaaggagatgggcgggaaggtcgtgggcgggaagggactgggcgggaaggctatgggcgggaaggacttgggcgggaaggtgctgggcgggaagggtatgggcgggaaggggcgcgccatgcttcatcagactct

SEQ ID NO: 1889 - DNA, 188 bp, Artificial Sequence; identical to SEQ ID NO: 1888
  Synthetic polynucleotide

SEQ ID NO: 1890 - DNA, 190 bp, Artificial Sequence
  Synthetic polynucleotide
atcatctcaccttgcctcctgaattctttggacctccccctgcaggccacttccgggttcagaccacttccgggttctcgccacttccgggttcgacccacttccgggttcctaccacttccgggttcactccacttccgggttctgcccacttccgggttcgtaggcgcgccatgcttcatcagactct

SEQ ID NO: 1891 - DNA, 190 bp, Artificial Sequence; identical to SEQ ID NO: 1890
  Synthetic polynucleotide

SEQ ID NO: 1892 - DNA, 190 bp, Artificial Sequence
  Synthetic polynucleotide
atcatctcaccttgcctcctgggtcactgttatctttccctgcaggggcgggggcgggggagaggcgggggcgggggtcgggcgggggcggggggacggcgggggcgggggctaggcgggggcgggggactggcgggggcgggggtgcggcgggggcggggggtaggcgcgccatgcttcatcagactct

SEQ ID NO: 1893 - DNA, 190 bp, Artificial Sequence; identical to SEQ ID NO: 1892
  Synthetic polynucleotide

SEQ ID NO: 1894 - DNA, 191 bp, Artificial Sequence
  Synthetic polynucleotide
atcatctcaccttgcctcctggcctaagccgctaccatcctgcaggttaattacggtaattacagattaattacggtaattactcgttaattacggtaattacgacttaattacggtaattacctattaattacggtaattacactttaattacggtaattactgcggcgcgccatgcttcatcagactct

SEQ ID NO: 1895 - DNA, 191 bp, Artificial Sequence; identical to SEQ ID NO: 1894
  Synthetic polynucleotide

SEQ ID NO: 1896 - DNA, 197 bp, Artificial Sequence
  Synthetic polynucleotide
atcatctcaccttgcctcctgagatagcacggactgatcctgcaggaatttgatacattttagaaatttgatacatttttcgaatttgatacattttgacaatttgatacattttctaaatttgatacattttactaatttgatacatttttgcaatttgatacattttgtaggcgcgccatgcttcatcagactct

SEQ ID NO: 1897 - DNA, 197 bp, Artificial Sequence; identical to SEQ ID NO: 1896
  Synthetic polynucleotide

SEQ ID NO: 1898 - DNA, 191 bp, Artificial Sequence
  Synthetic polynucleotide
atcatctcaccttgcctcctgaagcatatggatcaggacctgcaggagcagtgggtcccccagagaagcagtgggtcccccagtcgagcagtgggtcccccaggacagcagtgggtcccccagctaagcagtgggtcccccagactagcagtgggtcccccagtgcggcgcgccatgcttcatcagactct

SEQ ID NO: 1899 - DNA, 191 bp, Artificial Sequence; identical to SEQ ID NO: 1898
  Synthetic polynucleotide

SEQ ID NO: 1900 - DNA, 191 bp, Artificial Sequence
  Synthetic polynucleotide
atcatctcaccttgcctcctgatcccggattctctcatcctgcagggactagatatatatattcgatagagactagatatatatattcgattcggactagatatatatattcgatgacgactagatatatatattcgatctagactagatatatatattcgatactggcgcgccatgcttcatcagactct

SEQ ID NO: 1901 - DNA, 191 bp, Artificial Sequence; identical to SEQ ID NO: 1900
  Synthetic polynucleotide

SEQ ID NO: 1902 - DNA, 197 bp, Artificial Sequence
  Synthetic polynucleotide
atcatctcaccttgcctcctgcctacagggaatacgtccctgcaggacgatgagtcatgctagaacgatgagtcatgcttcgacgatgagtcatgctgacacgatgagtcatgctctaacgatgagtcatgctactacgatgagtcatgcttgcacgatgagtcatgctgtaggcgcgccatgcttcatcagactct

SEQ ID NO: 1903 - DNA, 197 bp, Artificial Sequence; identical to SEQ ID NO: 1902
  Synthetic polynucleotide

SEQ ID NO: 1904 - DNA, 164 bp, Artificial Sequence
  Synthetic polynucleotide
atcatctcaccttgcctcctggaatgctgcgcgcttctcctgcaggccacgcccaagaccacgcccatcgccacgcccagacccacgcccactaccacgcccaactccacgcccatgcccacgcccagtaccacgcccaggcgcgccatgcttcatcagactct

SEQ ID NO: 1905 - DNA, 164 bp, Artificial Sequence; identical to SEQ ID NO: 1904
  Synthetic polynucleotide

SEQ ID NO: 1906 - DNA, 197 bp, Artificial Sequence
  Synthetic polynucleotide
atcatctcaccttgcctcctggttcgttgtcactgaaccctgcaggaataagggcgtggtcagaaataagggcgtggtctcgaataagggcgtggtcgacaataagggcgtggtcctaaataagggcgtggtcactaataagggcgtggtctgcaataagggcgtggtcgtaggcgcgccatgcttcatcagactct

SEQ ID NO: 1907 - DNA, 197 bp, Artificial Sequence; identical to SEQ ID NO: 1906
  Synthetic polynucleotide

SEQ ID NO: 1908 - DNA, 180 bp, Artificial Sequence
  Synthetic polynucleotide
atcatctcaccttgcctcctggagaactgcaactacatcctgcaggttcacacctagagattcacacctagtcgttcacacctaggacttcacacctagctattcacacctagactttcacacctagtgcttcacacctaggtattcacacctagggcgcgccatgcttcatcagactct

SEQ ID NO: 1909 - DNA, 180 bp, Artificial Sequence; identical to SEQ ID NO: 1908
  Synthetic polynucleotide

SEQ ID NO: 1910 - DNA, 185 bp, Artificial Sequence
  Synthetic polynucleotide
atcatctcaccttgcctcctgagttgtggcgctacactcctgcaggattaggtaattaccttagaattaggtaattacctttcgattaggtaattaccttgacattaggtaattaccttctaattaggtaattaccttactattaggtaattacctttgcggcgcgccatgcttcatcagactct

SEQ ID NO: 1911 - DNA, 185 bp, Artificial Sequence; identical to SEQ ID NO: 1910
  Synthetic polynucleotide

SEQ ID NO: 1912 - DNA, 197 bp, Artificial Sequence
  Synthetic polynucleotide
atcatctcaccttgcctcctggtttaggaaagaaccctcctgcagggtggtcccggattatagagtggtcccggattattcggtggtcccggattatgacgtggtcccggattatctagtggtcccggattatactgtggtcccggattattgcgtggtcccggattatgtaggcgcgccatgcttcatcagactct

SEQ ID NO: 1913 - DNA, 197 bp, Artificial Sequence; identical to SEQ ID NO: 1912
  Synthetic polynucleotide

SEQ ID NO: 1914 - DNA, 172 bp, Artificial Sequence
  Synthetic polynucleotide
atcatctcaccttgcctcctgtaccgcgctattgccttcctgcaggttttattaccagattttattacctcgttttattaccgacttttattaccctattttattaccactttttattacctgcttttattaccgtattttattaccggcgcgccatgcttcatcagactct

SEQ ID NO: 1915 - DNA, 172 bp, Artificial Sequence; identical to SEQ ID NO: 1914
  Synthetic polynucleotide

SEQ ID NO: 1916 - DNA, 172 bp, Artificial Sequence
  Synthetic polynucleotide
atcatctcaccttgcctcctggagataacaccggcccacctgcaggaaatcacagcagaaaatcacagctcgaaatcacagcgacaaatcacagcctaaaatcacagcactaaatcacagctgcaaatcacagcgtaaaatcacagcggcgcgccatgcttcatcagactct

SEQ ID NO: 1917 - DNA, 172 bp, Artificial Sequence; identical to SEQ ID NO: 1916
  Synthetic polynucleotide

SEQ ID NO: 1918 - DNA, 164 bp, Artificial Sequence
  Synthetic polynucleotide
atcatctcaccttgcctcctgacatacctgttcttcagcctgcaggatgatacccagaatgataccctcgatgatacccgacatgatacccctaatgatacccactatgataccctgcatgatacccgtaatgatacccggcgcgccatgcttcatcagactct

SEQ ID NO: 1919 - DNA, 164 bp, Artificial Sequence; identical to SEQ ID NO: 1918
  Synthetic polynucleotide

SEQ ID NO: 1920 - DNA, 197 bp, Artificial Sequence
  Synthetic polynucleotide
atcatctcaccttgcctcctgacctctttgagttccttcctgcaggaggtcacggtgacctgggagaaggtcacggtgacctgggtcgaggtcacggtgacctggggacaggtcacggtgacctgggctaaggtcacggtgacctgggactaggtcacggtgacctgggtgcggcgcgccatgcttcatcagactct

SEQ ID NO: 1921 - DNA, 197 bp, Artificial Sequence; identical to SEQ ID NO: 1920
  Synthetic polynucleotide

SEQ ID NO: 1922 - DNA, 196 bp, Artificial Sequence
  Synthetic polynucleotide
atcatctcaccttgcctcctggagggatggctaatacccctgcaggaattaatcgaaatcaaattaaaagaaattaatcgaaatcaaattaaatcgaattaatcgaaatcaaattaaagacaattaatcgaaatcaaattaaactaaattaatcgaaatcaaattaaaactggcgcgccatgcttcatcagactct

SEQ ID NO: 1923 - DNA, 196 bp, Artificial Sequence; identical to SEQ ID NO: 1922
  Synthetic polynucleotide

SEQ ID NO: 1924 - DNA, 156 bp, Artificial Sequence
  Synthetic polynucleotide
atcatctcaccttgcctcctgggaatgcgaaggatgctcctgcagggcaattatagagcaattattcggcaattatgacgcaattatctagcaattatactgcaattattgcgcaattatgtagcaattatggcgcgccatgcttcatcagactct

SEQ ID NO: 1925 - DNA, 156 bp, Artificial Sequence; identical to SEQ ID NO: 1924
  Synthetic polynucleotide

SEQ ID NO: 1926 - DNA, 197 bp, Artificial Sequence
  Synthetic polynucleotide
atcatctcaccttgcctcctgtgccgactacttagcgacctgcaggtgatgactcattcttagatgatgactcattctttcgtgatgactcattcttgactgatgactcattcttctatgatgactcattcttacttgatgactcattctttgctgatgactcattcttgtaggcgcgccatgcttcatcagactct

SEQ ID NO: 1927 - DNA, 197 bp, Artificial Sequence; identical to SEQ ID NO: 1926
  Synthetic polynucleotide

SEQ ID NO: 1928 - DNA, 198 bp, Artificial Sequence
  Synthetic polynucleotide
atcatctcaccttgcctcctgtcgtcgcatagctagagcctgcaggtttcacacctcagaggtgtgagaagatttcacacctcagaggtgtgagatcgtttcacacctcagaggtgtgagagactttcacacctcagaggtgtgagactatttcacacctcagaggtgtgagaggcgcgccatgcttcatcagactct

SEQ ID NO: 1929 - DNA, 198 bp, Artificial Sequence; identical to SEQ ID NO: 1928
  Synthetic polynucleotide

SEQ ID NO: 1930 - DNA, 156 bp, Artificial Sequence
  Synthetic polynucleotide
atcatctcaccttgcctcctgggataccaccattatgtcctgcagggcaattagagagcaattagtcggcaattaggacgcaattagctagcaattagactgcaattagtgcgcaattaggtagcaattagggcgcgccatgcttcatcagactct

SEQ ID NO: 1931 - DNA, 156 bp, Artificial Sequence; identical to SEQ ID NO: 1930
  Synthetic polynucleotide

SEQ ID NO: 1932 - DNA, 197 bp, Artificial Sequence
  Synthetic polynucleotide
atcatctcaccttgcctcctggggaattacacccactacctgcaggtatatgcatattcatagatatatgcatattcattcgtatatgcatattcatgactatatgcatattcatctatatatgcatattcatacttatatgcatattcattgctatatgcatattcatgtaggcgcgccatgcttcatcagactct

SEQ ID NO: 1933 - DNA, 197 bp, Artificial Sequence; identical to SEQ ID NO: 1932
  Synthetic polynucleotide

SEQ ID NO: 1934 - DNA, 172 bp, Artificial Sequence
  Synthetic polynucleotide
atcatctcaccttgcctcctgattccgtggataacggacctgcaggcgcgagagttagacgcgagagtttcgcgcgagagttgaccgcgagagttctacgcgagagttactcgcgagagtttgccgcgagagttgtacgcgagagttggcgcgccatgcttcatcagactct

SEQ ID NO: 1935 - DNA, 172 bp, Artificial Sequence; identical to SEQ ID NO: 1934
  Synthetic polynucleotide

SEQ ID NO: 1936 - DNA, 196 bp, Artificial Sequence
  Synthetic polynucleotide
atcatctcaccttgcctcctgtagccgaggtacctaggcctgcaggaggccaaaggtcaagaaggccaaaggtcatcgaggccaaaggtcagacaggccaaaggtcactaaggccaaaggtcaactaggccaaaggtcatgcaggccaaaggtcagtaaggccaaaggtcaggcgcgccatgcttcatcagactct

SEQ ID NO: 1937 - DNA, 196 bp, Artificial Sequence; identical to SEQ ID NO: 1936
  Synthetic polynucleotide

SEQ ID NO: 1938 - DNA, 185 bp, Artificial Sequence
  Synthetic polynucleotide
atcatctcaccttgcctcctgctgagttccagccgtaccctgcaggtgattaattaattgacagatgattaattaattgactcgtgattaattaattgacgactgattaattaattgacctatgattaattaattgacacttgattaattaattgactgcggcgcgccatgcttcatcagactct

SEQ ID NO: 1939 - DNA, 185 bp, Artificial Sequence; identical to SEQ ID NO: 1938
  Synthetic polynucleotide

SEQ ID NO: 1940 - DNA, 197 bp, Artificial Sequence
  Synthetic polynucleotide
atcatctcaccttgcctcctgggctttactctagaatccctgcagggctgagtcagcaattagagctgagtcagcaatttcggctgagtcagcaattgacgctgagtcagcaattctagctgagtcagcaattactgctgagtcagcaatttgcgctgagtcagcaattgtaggcgcgccatgcttcatcagactct

SEQ ID NO: 1941 - DNA, 197 bp, Artificial Sequence; identical to SEQ ID NO: 1940
  Synthetic polynucleotide

SEQ ID NO: 1942 - DNA, 172 bp, Artificial Sequence
  Synthetic polynucleotide
atcatctcaccttgcctcctgccctcgagtggacaattcctgcaggggcacgcgccagaggcacgcgcctcgggcacgcgccgacggcacgcgccctaggcacgcgccactggcacgcgcctgcggcacgcgccgtaggcacgcgccggcgcgccatgcttcatcagactct

SEQ ID NO: 1943 - DNA, 172 bp, Artificial Sequence; identical to SEQ ID NO: 1942
  Synthetic polynucleotide

SEQ ID NO: 1944 - DNA, 186 bp, Artificial Sequence
  Synthetic polynucleotide
atcatctcaccttgcctcctgggcacatagtggcgaagcctgcagggggcatgtctgggcatgtctagagggcatgtctgggcatgtcttcggggcatgtctgggcatgtctgacgggcatgtctgggcatgtctctagggcatgtctgggcatgtctactggcgcgccatgcttcatcagactct

SEQ ID NO: 1945 - DNA, 186 bp, Artificial Sequence; identical to SEQ ID NO: 1944
  Synthetic polynucleotide

SEQ ID NO: 1946 - DNA, 164 bp, Artificial Sequence
  Synthetic polynucleotide
atcatctcaccttgcctcctgggtagttctaagcaggccctgcagggccgttagaagagccgttagatcggccgttagagacgccgttagactagccgttagaactgccgttagatgcgccgttagagtagccgttagaggcgcgccatgcttcatcagactct

SEQ ID NO: 1947 - DNA, 164 bp, Artificial Sequence; identical to SEQ ID NO: 1946
  Synthetic polynucleotide

SEQ ID NO: 1948 - DNA, 164 bp, Artificial Sequence
  Synthetic polynucleotide
atcatctcaccttgcctcctgctgaagctgggaggttgcctgcaggttaagtggtagattaagtggttcgttaagtggtgacttaagtggtctattaagtggtactttaagtggttgcttaagtggtgtattaagtggtggcgcgccatgcttcatcagactct

SEQ ID NO: 1949 - DNA, 164 bp, Artificial Sequence; identical to SEQ ID NO: 1948
  Synthetic polynucleotide

SEQ ID NO: 1950 - DNA, 185 bp, Artificial Sequence
  Synthetic polynucleotide
atcatctcaccttgcctcctgttagactaggatagtggcctgcagggctcattacgaatgacagagctcattacgaatgactcggctcattacgaatgacgacgctcattacgaatgacctagctcattacgaatgacactgctcattacgaatgactgcggcgcgccatgcttcatcagactct

SEQ ID NO: 1951 - DNA, 185 bp, Artificial Sequence; identical to SEQ ID NO: 1950
  Synthetic polynucleotide

SEQ ID NO: 1952 - DNA, 186 bp, Artificial Sequence
  Synthetic polynucleotide
atcatctcaccttgcctcctgactaaactcgcattatgcctgcaggcaggtgatttccgggaaatgagacaggtgatttccgggaaatgtcgcaggtgatttccgggaaatggaccaggtgatttccgggaaatgctacaggtgatttccgggaaatgactggcgcgccatgcttcatcagactct

SEQ ID NO: 1953 - DNA, 186 bp, Artificial Sequence; identical to SEQ ID NO: 1952
  Synthetic polynucleotide

SEQ ID NO: 1954 - DNA, 180 bp, Artificial Sequence
  Synthetic polynucleotide
atcatctcaccttgcctcctgtggtgtctgtcgacaaccctgcaggtagccagacagagatagccagacagtcgtagccagacaggactagccagacagctatagccagacagacttagccagacagtgctagccagacaggtatagccagacagggcgcgccatgcttcatcagactct

SEQ ID NO: 1955 - DNA, 180 bp, Artificial Sequence; identical to SEQ ID NO: 1954
  Synthetic polynucleotide

SEQ ID NO: 1956 - DNA, 172 bp, Artificial Sequence
  Synthetic polynucleotide
atcatctcaccttgcctcctggatccaataggtctcaccctgcaggttgtttacgaagattgtttacgatcgttgtttacgagacttgtttacgactattgtttacgaactttgtttacgatgcttgtttacgagtattgtttacgaggcgcgccatgcttcatcagactct

SEQ ID NO: 1957 - DNA, 172 bp, Artificial Sequence; identical to SEQ ID NO: 1956
  Synthetic polynucleotide

SEQ ID NO: 1958 - DNA, 196 bp, Artificial Sequence
  Synthetic polynucleotide
atcatctcaccttgcctcctgacctgactaaataagaccctgcaggtctatttatagaaagatctatttatagaatcgtctatttatagaagactctatttatagaactatctatttatagaaacttctatttatagaatgctctatttatagaagtatctatttatagaaggcgcgccatgcttcatcagactct

SEQ ID NO: 1959 - DNA, 196 bp, Artificial Sequence; identical to SEQ ID NO: 1958
  Synthetic polynucleotide

SEQ ID NO: 1960 - DNA, 190 bp, Artificial Sequence
  Synthetic polynucleotide
atcatctcaccttgcctcctgcatgcacctcgtttatgcctgcaggtaattaagcaattaagataattaagcaattatcgtaattaagcaattagactaattaagcaattactataattaagcaattaacttaattaagcaattatgctaattaagcaattagtaggcgcgccatgcttcatcagactct

SEQ ID NO: 1961 - DNA, 190 bp, Artificial Sequence; identical to SEQ ID NO: 1960
  Synthetic polynucleotide

SEQ ID NO: 1962 - DNA, 156 bp, Artificial Sequence
  Synthetic polynucleotide
atcatctcaccttgcctcctgaccgagaaaggtatatccctgcaggctaattgcagactaattgctcgctaattgcgacctaattgcctactaattgcactctaattgctgcctaattgcgtactaattgcggcgcgccatgcttcatcagactct

SEQ ID NO: 1963 - DNA, 156 bp, Artificial Sequence; identical to SEQ ID NO: 1962
  Synthetic polynucleotide

SEQ ID NO: 1964 - DNA, 190 bp, Artificial Sequence
  Synthetic polynucleotide
atcatctcaccttgcctcctggctctcgtacaaagctacctgcaggatgttgtttacgttagaatgttgtttacgtttcgatgttgtttacgttgacatgttgtttacgttctaatgttgtttacgttactatgttgtttacgtttgcatgttgtttacgttgtaggcgcgccatgcttcatcagactct

SEQ ID NO: 1965 - DNA, 190 bp, Artificial Sequence; identical to SEQ ID NO: 1964
  Synthetic polynucleotide

SEQ ID NO: 1966 - DNA, 197 bp, Artificial Sequence
  Synthetic polynucleotide
atcatctcaccttgcctcctgtttctatcctcggataccctgcaggtgattaattgtttatagatgattaattgtttattcgtgattaattgtttatgactgattaattgtttatctatgattaattgtttatacttgattaattgtttattgctgattaattgtttatgtaggcgcgccatgcttcatcagactct

SEQ ID NO: 1967 - DNA, 197 bp, Artificial Sequence; identical to SEQ ID NO: 1966
  Synthetic polynucleotide

SEQ ID NO: 1968 - DNA, 148 bp, Artificial Sequence
  Synthetic polynucleotide
atcatctcaccttgcctcctgcttcgaattagcccgtacctgcaggagtcattagaagtcatttcgagtcattgacagtcattctaagtcattactagtcatttgcagtcattgtaagtcattggcgcgccatgcttcatcagactct

SEQ ID NO: 1969 - DNA, 148 bp, Artificial Sequence; identical to SEQ ID NO: 1968
  Synthetic polynucleotide

SEQ ID NO: 1970 - DNA, 185 bp, Artificial Sequence
  Synthetic polynucleotide
atcatctcaccttgcctcctgagtccctccacttcacccctgcagggagtccaaagtccatcagagagtccaaagtccatctcggagtccaaagtccatcgacgagtccaaagtccatcctagagtccaaagtccatcactgagtccaaagtccatctgcggcgcgccatgcttcatcagactct

SEQ ID NO: 1971 - DNA, 185 bp, Artificial Sequence; identical to SEQ ID NO: 1970
  Synthetic polynucleotide

SEQ ID NO: 1972 - DNA, 156 bp, Artificial Sequence
  Synthetic polynucleotide
atcatctcaccttgcctcctgactaccgagtccagtatcctgcaggctaattggagactaattggtcgctaattgggacctaattggctactaattggactctaattggtgcctaattgggtactaattggggcgcgccatgcttcatcagactct

SEQ ID NO: 1973 - DNA, 156 bp, Artificial Sequence; identical to SEQ ID NO: 1972
  Synthetic polynucleotide

SEQ ID NO: 1974 - DNA, 164 bp, Artificial Sequence
  Synthetic polynucleotide
atcatctcaccttgcctcctgacacgccgtcataatcgcctgcaggatgccaaccagaatgccaacctcgatgccaaccgacatgccaaccctaatgccaaccactatgccaacctgcatgccaaccgtaatgccaaccggcgcgccatgcttcatcagactct

SEQ ID NO: 1975 - DNA, 164 bp, Artificial Sequence; identical to SEQ ID NO: 1974
  Synthetic polynucleotide

SEQ ID NO: 1976 - DNA, 188 bp, Artificial Sequence
  Synthetic polynucleotide
atcatctcaccttgcctcctggtaagtttgtggtctggcctgcaggaaaaccggttttagaaaaaccggtttttcgaaaaccggttttgacaaaaccggttttctaaaaaccggttttactaaaaccggtttttgcaaaaccggttttgtaaaaaccggttttggcgcgccatgcttcatcagactct

SEQ ID NO: 1977 - DNA, 188 bp, Artificial Sequence; identical to SEQ ID NO: 1976
  Synthetic polynucleotide

SEQ ID NO: 1978 - DNA, 191 bp, Artificial Sequence
  Synthetic polynucleotide
atcatctcaccttgcctcctggagtgtttacgctatcacctgcaggtgacctctccgtgacctagatgacctctccgtgaccttcgtgacctctccgtgacctgactgacctctccgtgacctctatgacctctccgtgacctacttgacctctccgtgaccttgcggcgcgccatgcttcatcagactct

SEQ ID NO: 1979 - DNA, 191 bp, Artificial Sequence; identical to SEQ ID NO: 1978
  Synthetic polynucleotide

SEQ ID NO: 1980 - DNA, 164 bp, Artificial Sequence
  Synthetic polynucleotide
atcatctcaccttgcctcctggtgccgttaaactggcgcctgcaggttgtgcaatagattgtgcaattcgttgtgcaatgacttgtgcaatctattgtgcaatactttgtgcaattgcttgtgcaatgtattgtgcaatggcgcgccatgcttcatcagactct

SEQ ID NO: 1981 - DNA, 164 bp, Artificial Sequence; identical to SEQ ID NO: 1980
  Synthetic polynucleotide

SEQ ID NO: 1982 - DNA, 180 bp, Artificial Sequence
  Synthetic polynucleotide
atcatctcaccttgcctcctgattggccctctcatgctcctgcaggataaattatgcagaataaattatgctcgataaattatgcgacataaattatgcctaataaattatgcactataaattatgctgcataaattatgcgtaataaattatgcggcgcgccatgcttcatcagactct

SEQ ID NO: 1983 - DNA, 180 bp, Artificial Sequence; identical to SEQ ID NO: 1982
  Synthetic polynucleotide

SEQ ID NO: 1984 - DNA, 197 bp, Artificial Sequence
  Synthetic polynucleotide
atcatctcaccttgcctcctgagaacgtatcagctttgcctgcaggaggtcagggtgacctagaaggtcagggtgaccttcgaggtcagggtgacctgacaggtcagggtgacctctaaggtcagggtgacctactaggtcagggtgaccttgcaggtcagggtgacctgtaggcgcgccatgcttcatcagactct

SEQ ID NO: 1985 - DNA, 197 bp, Artificial Sequence; identical to SEQ ID NO: 1984
  Synthetic polynucleotide

SEQ ID NO: 1986 - DNA, 191 bp, Artificial Sequence
  Synthetic polynucleotide
atcatctcaccttgcctcctgtgtcctgctaatgttctcctgcagggtcggtaattatagcgaagagtcggtaattatagcgatcggtcggtaattatagcgagacgtcggtaattatagcgactagtcggtaattatagcgaactgtcggtaattatagcgatgcggcgcgccatgcttcatcagactct

SEQ ID NO: 1987 - DNA, 191 bp, Artificial Sequence; identical to SEQ ID NO: 1986
  Synthetic polynucleotide

SEQ ID NO: 1988 - DNA, 185 bp, Artificial Sequence
  Synthetic polynucleotide
atcatctcaccttgcctcctggtaccttgctataaggtcctgcaggtaggtaataaaattcaagataggtaataaaattcatcgtaggtaataaaattcagactaggtaataaaattcactataggtaataaaattcaacttaggtaataaaattcatgcggcgcgccatgcttcatcagactct

SEQ ID NO: 1989 - DNA, 185 bp, Artificial Sequence; identical to SEQ ID NO: 1988
  Synthetic polynucleotide

SEQ ID NO: 1990 - DNA, 191 bp, Artificial Sequence
  Synthetic polynucleotide
atcatctcaccttgcctcctgcccagaatccttcttaccctgcagggtagttaatccccttaaagagtagttaatccccttaatcggtagttaatccccttaagacgtagttaatccccttaactagtagttaatccccttaaactgtagttaatccccttaatgcggcgcgccatgcttcatcagactct

SEQ ID NO: 1991 - DNA, 191 bp, Artificial Sequence; identical to SEQ ID NO: 1990
  Synthetic polynucleotide

SEQ ID NO: 1992 - DNA, 180 bp, Artificial Sequence
  Synthetic polynucleotide
atcatctcaccttgcctcctgtgacccacctgtgatcacctgcaggattaataattaagaattaataattatcgattaataattagacattaataattactaattaataattaactattaataattatgcattaataattagtaattaataattaggcgcgccatgcttcatcagactct

SEQ ID NO: 1993 - DNA, 180 bp, Artificial Sequence; identical to SEQ ID NO: 1992
  Synthetic polynucleotide

SEQ ID NO: 1994 - DNA, 156 bp, Artificial Sequence
  Synthetic polynucleotide
atcatctcaccttgcctcctgttcacaatcacaagatccctgcaggtcaattaaagatcaattaatcgtcaattaagactcaattaactatcaattaaacttcaattaatgctcaattaagtatcaattaaggcgcgccatgcttcatcagactct

SEQ ID NO: 1995 - DNA, 156 bp, Artificial Sequence; identical to SEQ ID NO: 1994
  Synthetic polynucleotide

SEQ ID NO: 1996 - DNA, 191 bp, Artificial Sequence
  Synthetic polynucleotide
atcatctcaccttgcctcctggtgtattatgagagccgcctgcaggaaaagtgataccccattagaaaaagtgataccccatttcgaaaagtgataccccattgacaaaagtgataccccattctaaaaagtgataccccattactaaaagtgataccccatttgcggcgcgccatgcttcatcagactct

SEQ ID NO: 1997 - DNA, 191 bp, Artificial Sequence; identical to SEQ ID NO: 1996
  Synthetic polynucleotide

SEQ ID NO: 1998 - DNA, 190 bp, Artificial Sequence
  Synthetic polynucleotide
atcatctcaccttgcctcctggtgattgtttgctgcgacctgcaggccgccccctgctggagaccgccccctgctggtcgccgccccctgctgggacccgccccctgctggctaccgccccctgctggactccgccccctgctggtgcccgccccctgctgggtaggcgcgccatgcttcatcagactct

SEQ ID NO: 1999 - DNA, 190 bp, Artificial Sequence; identical to SEQ ID NO: 1998
  Synthetic polynucleotide

SEQ ID NO: 2000 - DNA, 180 bp, Artificial Sequence
  Synthetic polynucleotide
atcatctcaccttgcctcctgcgagaaacagacccagtcctgcaggttagctaattaagattagctaattatcgttagctaattagacttagctaattactattagctaattaactttagctaattatgcttagctaattagtattagctaattaggcgcgccatgcttcatcagactct

SEQ ID NO: 2001 - DNA, 180 bp, Artificial Sequence; identical to SEQ ID NO: 2000
  Synthetic polynucleotide

SEQ ID NO: 2002 - DNA, 172 bp, Artificial Sequence
  Synthetic polynucleotide
atcatctcaccttgcctcctggttacccgtacggacgtcctgcaggagccaaaattagaagccaaaatttcgagccaaaattgacagccaaaattctaagccaaaattactagccaaaatttgcagccaaaattgtaagccaaaattggcgcgccatgcttcatcagactct

SEQ ID NO: 2003 - DNA, 172 bp, Artificial Sequence; identical to SEQ ID NO: 2002
  Synthetic polynucleotide

SEQ ID NO: 2004 - DNA, 197 bp, Artificial Sequence
  Synthetic polynucleotide
atcatctcaccttgcctcctgtagtcgcgtatctaactcctgcaggctctgtttactttgcagactctgtttactttgctcgctctgtttactttgcgacctctgtttactttgcctactctgtttactttgcactctctgtttactttgctgcctctgtttactttgcgtaggcgcgccatgcttcatcagactct

SEQ ID NO: 2005 - DNA, 197 bp, Artificial Sequence; identical to SEQ ID NO: 2004
  Synthetic polynucleotide

SEQ ID NO: 2006 - DNA, 185 bp, Artificial Sequence
  Synthetic polynucleotide
atcatctcaccttgcctcctgccacgtccaccgatactcctgcaggctctaaaaataactctagactctaaaaataactcttcgctctaaaaataactctgacctctaaaaataactctctactctaaaaataactctactctctaaaaataactcttgcggcgcgccatgcttcatcagactct

SEQ ID NO: 2007 - DNA, 185 bp, Artificial Sequence; identical to SEQ ID NO: 2006
  Synthetic polynucleotide

SEQ ID NO: 2008 - DNA, 156 bp, Artificial Sequence
  Synthetic polynucleotide
atcatctcaccttgcctcctgattaaacgtcctcaatgcctgcaggttgatctcagattgatctctcgttgatctcgacttgatctcctattgatctcactttgatctctgcttgatctcgtattgatctcggcgcgccatgcttcatcagactct

SEQ ID NO: 2009 - DNA, 156 bp, Artificial Sequence; identical to SEQ ID NO: 2008
  Synthetic polynucleotide

SEQ ID NO: 2010 - DNA, 180 bp, Artificial Sequence
  Synthetic polynucleotide
atcatctcaccttgcctcctgggagttgctctgtcacccctgcaggaacatcaaaggagaaacatcaaaggtcgaacatcaaagggacaacatcaaaggctaaacatcaaaggactaacatcaaaggtgcaacatcaaagggtaaacatcaaaggggcgcgccatgcttcatcagactct

SEQ ID NO: 2011 - DNA, 180 bp, Artificial Sequence; identical to SEQ ID NO: 2010
  Synthetic polynucleotide

SEQ ID NO: 2012 - DNA, 188 bp, Artificial Sequence
  Synthetic polynucleotide
atcatctcaccttgcctcctgctattgtgcctctctgccctgcaggttatgttaaatcagattatgttaaatctcgttatgttaaatcgacttatgttaaatcctattatgttaaatcactttatgttaaatctgcttatgttaaatcgtattatgttaaatcggcgcgccatgcttcatcagactct

SEQ ID NO: 2013 - DNA, 188 bp, Artificial Sequence; identical to SEQ ID NO: 2012
  Synthetic polynucleotide

SEQ ID NO: 2014 - DNA, 191 bp, Artificial Sequence
  Synthetic polynucleotide
atcatctcaccttgcctcctgaccacaattcgttcagacctgcagggggtttaattaaaattcagagggtttaattaaaattctcggggtttaattaaaattcgacgggtttaattaaaattcctagggtttaattaaaattcactgggtttaattaaaattctgcggcgcgccatgcttcatcagactct

SEQ ID NO: 2015 - DNA, 191 bp, Artificial Sequence; identical to SEQ ID NO: 2014
  Synthetic polynucleotide

SEQ ID NO: 2016 - DNA, 197 bp, Artificial Sequence
  Synthetic polynucleotide
atcatctcaccttgcctcctgagccgatgaaggtcttgcctgcaggggccgccattttggtagaggccgccattttggttcgggccgccattttggtgacggccgccattttggtctaggccgccattttggtactggccgccattttggttgcggccgccattttggtgtaggcgcgccatgcttcatcagactct

SEQ ID NO: 2017 - DNA, 197 bp, Artificial Sequence; identical to SEQ ID NO: 2016
  Synthetic polynucleotide

SEQ ID NO: 2018 - DNA, 191 bp, Artificial Sequence
  Synthetic polynucleotide
atcatctcaccttgcctcctgaggtaagcttcacagctcctgcaggaagaacaggttgttgtaagaaagaacaggttgttgtatcgaagaacaggttgttgtagacaagaacaggttgttgtactaaagaacaggttgttgtaactaagaacaggttgttgtatgcggcgcgccatgcttcatcagactct

SEQ ID NO: 2019 - DNA, 191 bp, Artificial Sequence; identical to SEQ ID NO: 2018
  Synthetic polynucleotide

SEQ ID NO: 2020 - DNA, 197 bp, Artificial Sequence
  Synthetic polynucleotide
atcatctcaccttgcctcctgtattcagcgaacccaaacctgcagggtggtcccggatcatagagtggtcccggatcattcggtggtcccggatcatgacgtggtcccggatcatctagtggtcccggatcatactgtggtcccggatcattgcgtggtcccggatcatgtaggcgcgccatgcttcatcagactct

SEQ ID NO: 2021 - DNA, 197 bp, Artificial Sequence; identical to SEQ ID NO: 2020
  Synthetic polynucleotide

SEQ ID NO: 2022 - DNA, 191 bp, Artificial Sequence
  Synthetic polynucleotide
atcatctcaccttgcctcctgaagtttggccacggttgcctgcaggaccactaattagtggacagaaccactaattagtggactcgaccactaattagtggacgacaccactaattagtggacctaaccactaattagtggacactaccactaattagtggactgcggcgcgccatgcttcatcagactct

SEQ ID NO: 2023 - DNA, 191 bp, Artificial Sequence; identical to SEQ ID NO: 2022
  Synthetic polynucleotide

SEQ ID NO: 2024 - DNA, 172 bp, Artificial Sequence
  Synthetic polynucleotide
atcatctcaccttgcctcctggtactcgatgctaaatacctgcaggggggtatcatagaggggtatcattcgggggtatcatgacggggtatcatctaggggtatcatactggggtatcattgcggggtatcatgtaggggtatcatggcgcgccatgcttcatcagactct

SEQ ID NO: 2025 - DNA, 172 bp, Artificial Sequence; identical to SEQ ID NO: 2024
  Synthetic polynucleotide

SEQ ID NO: 2026 - DNA, 185 bp, Artificial Sequence
  Synthetic polynucleotide
atcatctcaccttgcctcctggcgtgctgatcactacgcctgcaggtgtcaggtgtcacctgagatgtcaggtgtcacctgtcgtgtcaggtgtcacctggactgtcaggtgtcacctgctatgtcaggtgtcacctgacttgtcaggtgtcacctgtgcggcgcgccatgcttcatcagactct

SEQ ID NO: 2027 - DNA, 185 bp, Artificial Sequence; identical to SEQ ID NO: 2026
  Synthetic polynucleotide

SEQ ID NO: 2028 - DNA, 196 bp, Artificial Sequence
  Synthetic polynucleotide
atcatctcaccttgcctcctggccgacacagaggattgcctgcagggactgcaattcatagagactgcaattcattcggactgcaattcatgacgactgcaattcatctagactgcaattcatactgactgcaattcattgcgactgcaattcatgtagactgcaattcatggcgcgccatgcttcatcagactct

SEQ ID NO: 2029 - DNA, 196 bp, Artificial Sequence; identical to SEQ ID NO: 2028
  Synthetic polynucleotide

SEQ ID NO: 2030 - DNA, 172 bp, Artificial Sequence
  Synthetic polynucleotide
atcatctcaccttgcctcctggcgattattagcgttcgcctgcaggcagccaatcaagacagccaatcatcgcagccaatcagaccagccaatcactacagccaatcaactcagccaatcatgccagccaatcagtacagccaatcaggcgcgccatgcttcatcagactct

SEQ ID NO: 2031 - DNA, 172 bp, Artificial Sequence; identical to SEQ ID NO: 2030
  Synthetic polynucleotide

SEQ ID NO: 2032 - DNA, 148 bp, Artificial Sequence
  Synthetic polynucleotide
atcatctcaccttgcctcctgcgcctctttatcgatagcctgcaggggattaaagaggattaatcgggattaagacggattaactaggattaaactggattaatgcggattaagtaggattaaggcgcgccatgcttcatcagactct

SEQ ID NO: 2033 - DNA, 148 bp, Artificial Sequence; identical to SEQ ID NO: 2032
  Synthetic polynucleotide

SEQ ID NO: 2034 - DNA, 188 bp, Artificial Sequence
  Synthetic polynucleotide
atcatctcaccttgcctcctggccatcctgggtttgtacctgcaggtttgttgtgttcagatttgttgtgttctcgtttgttgtgttcgactttgttgtgttcctatttgttgtgttcacttttgttgtgttctgctttgttgtgttcgtatttgttgtgttcggcgcgccatgcttcatcagactct

SEQ ID NO: 2035 - DNA, 188 bp, Artificial Sequence; identical to SEQ ID NO: 2034
  Synthetic polynucleotide

SEQ ID NO: 2036 - DNA, 140 bp, Artificial Sequence
  Synthetic polynucleotide
atcatctcaccttgcctcctggtgacagttagttcggacctgcaggcacgtgagacacgtgtcgcacgtggaccacgtgctacacgtgactcacgtgtgccacgtggtacacgtgggcgcgccatgcttcatcagactct

SEQ ID NO: 2037 - DNA, 140 bp, Artificial Sequence; identical to SEQ ID NO: 2036
  Synthetic polynucleotide

SEQ ID NO: 2038 - DNA, 200 bp, Artificial Sequence
  Synthetic polynucleotide
atcatctcaccttgcctcctggacaatcgacagcacctcctgcaggtcgtgacctttgaccctgtagatcgtgacctttgaccctgttcgtcgtgacctttgaccctgtgactcgtgacctttgaccctgtctatcgtgacctttgaccctgtacttcgtgacctttgaccctgtggcgcgccatgcttcatcagactct

SEQ ID NO: 2039 - DNA, 200 bp, Artificial Sequence; identical to SEQ ID NO: 2038
  Synthetic polynucleotide

SEQ ID NO: 2040 - DNA, 180 bp, Artificial Sequence
  Synthetic polynucleotide
atcatctcaccttgcctcctgtgtaaagttcggacaaacctgcaggaccagggggcgagaaccagggggcgtcgaccagggggcggacaccagggggcgctaaccagggggcgactaccagggggcgtgcaccagggggcggtaaccagggggcgggcgcgccatgcttcatcagactct

SEQ ID NO: 2041 - DNA, 180 bp, Artificial Sequence; identical to SEQ ID NO: 2040
  Synthetic polynucleotide

SEQ ID NO: 2042 - DNA, 188 bp, Artificial Sequence
  Synthetic polynucleotide
atcatctcaccttgcctcctgtttggtgcggcgcctttcctgcaggtccagatgtttcagatccagatgtttctcgtccagatgtttcgactccagatgtttcctatccagatgtttcacttccagatgtttctgctccagatgtttcgtatccagatgtttcggcgcgccatgcttcatcagactct

SEQ ID NO: 2043 - DNA, 188 bp, Artificial Sequence; identical to SEQ ID NO: 2042
  Synthetic polynucleotide

SEQ ID NO: 2044 - DNA, 191 bp, Artificial Sequence
  Synthetic polynucleotide
atcatctcaccttgcctcctggcgaagaaacggacgaacctgcaggctcagcagctgctcctgagactcagcagctgctcctgtcgctcagcagctgctcctggacctcagcagctgctcctgctactcagcagctgctcctgactctcagcagctgctcctgtgcggcgcgccatgcttcatcagactct

SEQ ID NO: 2045 - DNA, 191 bp, Artificial Sequence; identical to SEQ ID NO: 2044
  Synthetic polynucleotide

SEQ ID NO: 2046 - DNA, 148 bp, Artificial Sequence
  Synthetic polynucleotide
atcatctcaccttgcctcctgccactgtccaatacagccctgcagggtcatgcagagtcatgctcggtcatgcgacgtcatgcctagtcatgcactgtcatgctgcgtcatgcgtagtcatgcggcgcgccatgcttcatcagactct

SEQ ID NO: 2047 - DNA, 148 bp, Artificial Sequence; identical to SEQ ID NO: 2046
  Synthetic polynucleotide

SEQ ID NO: 2048 - DNA, 172 bp, Artificial Sequence
  Synthetic polynucleotide
atcatctcaccttgcctcctggcttctcattcgacccacctgcagggggaatccccagagggaatcccctcggggaatccccgacgggaatccccctagggaatccccactgggaatcccctgcgggaatccccgtagggaatccccggcgcgccatgcttcatcagactct

SEQ ID NO: 2049 - DNA, 172 bp, Artificial Sequence; identical to SEQ ID NO: 2048
  Synthetic polynucleotide

SEQ ID NO: 2050 - DNA, 196 bp, Artificial Sequence
  Synthetic polynucleotide
atcatctcaccttgcctcctgacaggcaaactttgttacctgcaggctaatttaatcaaagactaatttaatcaatcgctaatttaatcaagacctaatttaatcaactactaatttaatcaaactctaatttaatcaatgcctaatttaatcaagtactaatttaatcaaggcgcgccatgcttcatcagactct

SEQ ID NO: 2051 - DNA, 196 bp, Artificial Sequence; identical to SEQ ID NO: 2050
  Synthetic polynucleotide

SEQ ID NO: 2052 - DNA, 172 bp, Artificial Sequence
  Synthetic polynucleotide
atcatctcaccttgcctcctgcctgcagaaggtgcgaacctgcaggatggggtgatagaatggggtgattcgatggggtgatgacatggggtgatctaatggggtgatactatggggtgattgcatggggtgatgtaatggggtgatggcgcgccatgcttcatcagactct

SEQ ID NO: 2053 - DNA, 172 bp, Artificial Sequence; identical to SEQ ID NO: 2052
  Synthetic polynucleotide

SEQ ID NO: 2054 - DNA, 172 bp, Artificial Sequence
  Synthetic polynucleotide
atcatctcaccttgcctcctgcttgccgcctggacatacctgcaggttaagtggctagattaagtggcttcgttaagtggctgacttaagtggctctattaagtggctactttaagtggcttgcttaagtggctgtattaagtggctggcgcgccatgcttcatcagactct

SEQ ID NO: 2055 - DNA, 172 bp, Artificial Sequence; identical to SEQ ID NO: 2054
  Synthetic polynucleotide

SEQ ID NO: 2056 - DNA, 196 bp, Artificial Sequence
  Synthetic polynucleotide
atcatctcaccttgcctcctgtatcgctctagctccgccctgcagggcgggggcgggggagagcgggggcgggggtcggcgggggcggggggacgcgggggcgggggctagcgggggcgggggactgcgggggcgggggtgcgcgggggcggggggtagcgggggcgggggggcgcgccatgcttcatcagactct

SEQ ID NO: 2057 - DNA, 196 bp, Artificial Sequence; identical to SEQ ID NO: 2056
  Synthetic polynucleotide

SEQ ID NO: 2058 - DNA, 156 bp, Artificial Sequence
  Synthetic polynucleotide
atcatctcaccttgcctcctggcattcacataccagggcctgcaggcatgcagcagacatgcagctcgcatgcagcgaccatgcagcctacatgcagcactcatgcagctgccatgcagcgtacatgcagcggcgcgccatgcttcatcagactct

SEQ ID NO: 2059 - DNA, 156 bp, Artificial Sequence; identical to SEQ ID NO: 2058
  Synthetic polynucleotide

SEQ ID NO: 2060 - DNA, 191 bp, Artificial Sequence
  Synthetic polynucleotide
atcatctcaccttgcctcctgcccaaagcgacttggagcctgcaggttttcgcacctgtggatagattttcgcacctgtggattcgttttcgcacctgtggatgacttttcgcacctgtggatctattttcgcacctgtggatactttttcgcacctgtggattgcggcgcgccatgcttcatcagactct

SEQ ID NO: 2061 - DNA, 191 bp, Artificial Sequence; identical to SEQ ID NO: 2060
  Synthetic polynucleotide

SEQ ID NO: 2062 - DNA, 172 bp, Artificial Sequence
  Synthetic polynucleotide
atcatctcaccttgcctcctgcacatctcaggatcgtgcctgcagggaacacctgcagagaacacctgctcggaacacctgcgacgaacacctgcctagaacacctgcactgaacacctgctgcgaacacctgcgtagaacacctgcggcgcgccatgcttcatcagactct

SEQ ID NO: 2063 - DNA, 172 bp, Artificial Sequence; identical to SEQ ID NO: 2062
  Synthetic polynucleotide

SEQ ID NO: 2064 - DNA, 164 bp, Artificial Sequence
  Synthetic polynucleotide
atcatctcaccttgcctcctgaagatcgtactcaagaacctgcaggcacgtgaccagacacgtgacctcgcacgtgaccgaccacgtgaccctacacgtgaccactcacgtgacctgccacgtgaccgtacacgtgaccggcgcgccatgcttcatcagactct

SEQ ID NO: 2065 - DNA, 164 bp, Artificial Sequence; identical to SEQ ID NO: 2064
  Synthetic polynucleotide

SEQ ID NO: 2066 - DNA, 180 bp, Artificial Sequence
  Synthetic polynucleotide
atcatctcaccttgcctcctgtagccactcccaatgttcctgcaggggtcacgtggcagaggtcacgtggctcgggtcacgtggcgacggtcacgtggcctaggtcacgtggcactggtcacgtggctgcggtcacgtggcgtaggtcacgtggcggcgcgccatgcttcatcagactct

SEQ ID NO: 2067 - DNA, 180 bp, Artificial Sequence; identical to SEQ ID NO: 2066
  Synthetic polynucleotide

SEQ ID NO: 2068 - DNA, 156 bp, Artificial Sequence
  Synthetic polynucleotide
atcatctcaccttgcctcctgctgttctgctcgttaaacctgcaggatttgcatagaatttgcattcgatttgcatgacatttgcatctaatttgcatactatttgcattgcatttgcatgtaatttgcatggcgcgccatgcttcatcagactct

SEQ ID NO: 2069 - DNA, 156 bp, Artificial Sequence; identical to SEQ ID NO: 2068
  Synthetic polynucleotide

SEQ ID NO: 2070 - DNA, 188 bp, Artificial Sequence
  Synthetic polynucleotide
atcatctcaccttgcctcctgctgcgcgtaaagaggagcctgcaggttatgcaaattaagattatgcaaattatcgttatgcaaattagacttatgcaaattactattatgcaaattaactttatgcaaattatgcttatgcaaattagtattatgcaaattaggcgcgccatgcttcatcagactct

SEQ ID NO: 2071 - DNA, 188 bp, Artificial Sequence; identical to SEQ ID NO: 2070
  Synthetic polynucleotide

SEQ ID NO: 2072 - DNA, 186 bp, Artificial Sequence
  Synthetic polynucleotide
atcatctcaccttgcctcctgaaaggttgcagactgggcctgcagggccaccagggggcgccggagagagccaccagggggcgccggagtcggccaccagggggcgccggaggacgccaccagggggcgccggagctagccaccagggggcgccggagactggcgcgccatgcttcatcagactct

SEQ ID NO: 2073 - DNA, 186 bp, Artificial Sequence; identical to SEQ ID NO: 2072
  Synthetic polynucleotide

SEQ ID NO: 2074 - DNA, 164 bp, Artificial Sequence
  Synthetic polynucleotide
atcatctcaccttgcctcctgcgaggattgagccgattcctgcagggggagctgtagagggagctgttcggggagctgtgacgggagctgtctagggagctgtactgggagctgttgcgggagctgtgtagggagctgtggcgcgccatgcttcatcagactct

SEQ ID NO: 2075 - DNA, 164 bp, Artificial Sequence; identical to SEQ ID NO: 2074
  Synthetic polynucleotide

SEQ ID NO: 2076 - DNA, 148 bp, Artificial Sequence
  Synthetic polynucleotide
atcatctcaccttgcctcctgaaagagctgccgtcgtccctgcagggcagctgagagcagctgtcggcagctggacgcagctgctagcagctgactgcagctgtgcgcagctggtagcagctgggcgcgccatgcttcatcagactct

SEQ ID NO: 2077 - DNA, 148 bp, Artificial Sequence; identical to SEQ ID NO: 2076
  Synthetic polynucleotide

SEQ ID NO: 2078 - DNA, 164 bp, Artificial Sequence
  Synthetic polynucleotide
atcatctcaccttgcctcctggggcgctgtgtttattccctgcaggcccataaaaagacccataaaatcgcccataaaagaccccataaaactacccataaaaactcccataaaatgccccataaaagtacccataaaaggcgcgccatgcttcatcagactct

SEQ ID NO: 2079 - DNA, 164 bp, Artificial Sequence; identical to SEQ ID NO: 2078
  Synthetic polynucleotide

SEQ ID NO: 2080 - DNA, 186 bp, Artificial Sequence
  Synthetic polynucleotide
atcatctcaccttgcctcctgtaacttcgcatcgcgtacctgcagggcaaggcatgatgggaaatcagagcaaggcatgatgggaaatctcggcaaggcatgatgggaaatcgacgcaaggcatgatgggaaatcctagcaaggcatgatgggaaatcactggcgcgccatgcttcatcagactct

SEQ ID NO: 2081 - DNA, 186 bp, Artificial Sequence; identical to SEQ ID NO: 2080
  Synthetic polynucleotide

SEQ ID NO: 2082 - DNA, 188 bp, Artificial Sequence
  Synthetic polynucleotide
atcatctcaccttgcctcctgttcgaccgtataatactcctgcagggccatatatggtagagccatatatggttcggccatatatggtgacgccatatatggtctagccatatatggtactgccatatatggttgcgccatatatggtgtagccatatatggtggcgcgccatgcttcatcagactct

SEQ ID NO: 2083 - DNA, 188 bp, Artificial Sequence; identical to SEQ ID NO: 2082
  Synthetic polynucleotide

SEQ ID NO: 2084 - DNA, 191 bp, Artificial Sequence
  Synthetic polynucleotide
atcatctcaccttgcctcctgagtgcggaccgtgaattcctgcaggcggaattaattaataggagacggaattaattaataggtcgcggaattaattaatagggaccggaattaattaataggctacggaattaattaataggactcggaattaattaataggtgcggcgcgccatgcttcatcagactct

SEQ ID NO: 2085 - DNA, 191 bp, Artificial Sequence; identical to SEQ ID NO: 2084
  Synthetic polynucleotide

SEQ ID NO: 2086 - DNA, 196 bp, Artificial Sequence
  Synthetic polynucleotide
atcatctcaccttgcctcctgtcgttcagagtacttatcctgcaggattttgcaatctgagaattttgcaatctgtcgattttgcaatctggacattttgcaatctgctaattttgcaatctgactattttgcaatctgtgcattttgcaatctggtaattttgcaatctgggcgcgccatgcttcatcagactct

SEQ ID NO: 2087 - DNA, 196 bp, Artificial Sequence; identical to SEQ ID NO: 2086
  Synthetic polynucleotide

SEQ ID NO: 2088 - DNA, 172 bp, Artificial Sequence
  Synthetic polynucleotide
atcatctcaccttgcctcctgtagcctcgttgagaactcctgcagggcagaacaatagagcagaacaattcggcagaacaatgacgcagaacaatctagcagaacaatactgcagaacaattgcgcagaacaatgtagcagaacaatggcgcgccatgcttcatcagactct

SEQ ID NO: 2089 - DNA, 172 bp, Artificial Sequence; identical to SEQ ID NO: 2088
  Synthetic polynucleotide

SEQ ID NO: 2090 - DNA, 188 bp, Artificial Sequence
  Synthetic polynucleotide
atcatctcaccttgcctcctggccgtgtcctcatataccctgcaggtttccccacacgagatttccccacacgtcgtttccccacacggactttccccacacgctatttccccacacgacttttccccacacgtgctttccccacacggtatttccccacacgggcgcgccatgcttcatcagactct

SEQ ID NO: 2091 - DNA, 188 bp, Artificial Sequence; identical to SEQ ID NO: 2090
  Synthetic polynucleotide

SEQ ID NO: 2092 - DNA, 172 bp, Artificial Sequence
  Synthetic polynucleotide
atcatctcaccttgcctcctgacacacgcgtattagatcctgcaggtaattagcatagataattagcattcgtaattagcatgactaattagcatctataattagcatacttaattagcattgctaattagcatgtataattagcatggcgcgccatgcttcatcagactct

SEQ ID NO: 2093 - DNA, 172 bp, Artificial Sequence; identical to SEQ ID NO: 2092
  Synthetic polynucleotide

SEQ ID NO: 2094 - DNA, 148 bp, Artificial Sequence
  Synthetic polynucleotide
atcatctcaccttgcctcctgttacggtttaatgggcccctgcaggagtcatgagaagtcatgtcgagtcatggacagtcatgctaagtcatgactagtcatgtgcagtcatggtaagtcatgggcgcgccatgcttcatcagactct

SEQ ID NO: 2095 - DNA, 148 bp, Artificial Sequence; identical to SEQ ID NO: 2094
  Synthetic polynucleotide

SEQ ID NO: 2096 - DNA, 156 bp, Artificial Sequence
  Synthetic polynucleotide
atcatctcaccttgcctcctgtccgaactcaacggcgacctgcaggtcattcacagatcattcactcgtcattcacgactcattcacctatcattcacacttcattcactgctcattcacgtatcattcacggcgcgccatgcttcatcagactct

SEQ ID NO: 2097 - DNA, 156 bp, Artificial Sequence; identical to SEQ ID NO: 2096
  Synthetic polynucleotide

SEQ ID NO: 2098 - DNA, 196 bp, Artificial Sequence
  Synthetic polynucleotide
atcatctcaccttgcctcctgagcaacaccaagtggagcctgcaggctttatttcttatctctaaaaaagactttatttcttatctctaaaaatcgctttatttcttatctctaaaaagacctttatttcttatctctaaaaactactttatttcttatctctaaaaaactggcgcgccatgcttcatcagactct

SEQ ID NO: 2099 - DNA, 196 bp, Artificial Sequence; identical to SEQ ID NO: 2098
  Synthetic polynucleotide

SEQ ID NO: 2100 - DNA, 190 bp, Artificial Sequence
  Synthetic polynucleotide
atcatctcaccttgcctcctgttcccaagtaacaagaccctgcaggacgaaaccgaaactagaacgaaaccgaaacttcgacgaaaccgaaactgacacgaaaccgaaactctaacgaaaccgaaactactacgaaaccgaaacttgcacgaaaccgaaactgtaggcgcgccatgcttcatcagactct

SEQ ID NO: 2101 - DNA, 190 bp, Artificial Sequence; identical to SEQ ID NO: 2100
  Synthetic polynucleotide

SEQ ID NO: 2102 - DNA, 197 bp, Artificial Sequence
  Synthetic polynucleotide
atcatctcaccttgcctcctgcctcttctagtggatatcctgcaggatgcccatatatggtaatagaatgcccatatatggtaattcgatgcccatatatggtaatgacatgcccatatatggtaatctaatgcccatatatggtaatactatgcccatatatggtaattgcggcgcgccatgcttcatcagactct

SEQ ID NO: 2103 - DNA, 197 bp, Artificial Sequence; identical to SEQ ID NO: 2102
  Synthetic polynucleotide

SEQ ID NO: 2104 - DNA, 197 bp, Artificial Sequence
  Synthetic polynucleotide
atcatctcaccttgcctcctgctggcagcaacttgggtcctgcaggatgaattccattcatagaatgaattccattcattcgatgaattccattcatgacatgaattccattcatctaatgaattccattcatactatgaattccattcattgcatgaattccattcatgtaggcgcgccatgcttcatcagactct

SEQ ID NO: 2105 - DNA, 197 bp, Artificial Sequence; identical to SEQ ID NO: 2104
  Synthetic polynucleotide

SEQ ID NO: 2106 - DNA, 197 bp, Artificial Sequence
  Synthetic polynucleotide
atcatctcaccttgcctcctggggctaaggttgtatgtcctgcagggagtctaatgacccaagagagtctaatgacccatcggagtctaatgacccagacgagtctaatgacccactagagtctaatgacccaactgagtctaatgacccatgcgagtctaatgacccagtaggcgcgccatgcttcatcagactct

SEQ ID NO: 2107 - DNA, 197 bp, Artificial Sequence; identical to SEQ ID NO: 2106
  Synthetic polynucleotide

SEQ ID NO: 2108 - DNA, 156 bp, Artificial Sequence
  Synthetic polynucleotide
atcatctcaccttgcctcctgtagagatttcgactccgcctgcaggattagtacagaattagtactcgattagtacgacattagtacctaattagtacactattagtactgcattagtacgtaattagtacggcgcgccatgcttcatcagactct

SEQ ID NO: 2109 - DNA, 156 bp, Artificial Sequence; identical to SEQ ID NO: 2108
  Synthetic polynucleotide

SEQ ID NO: 2110 - DNA, 186 bp, Artificial Sequence
  Synthetic polynucleotide
atcatctcaccttgcctcctgaatgcataagcaaggatcctgcaggagacatgcccagacatgcccagaagacatgcccagacatgccctcgagacatgcccagacatgcccgacagacatgcccagacatgcccctaagacatgcccagacatgcccactggcgcgccatgcttcatcagactct

SEQ ID NO: 2111 - DNA, 186 bp, Artificial Sequence; identical to SEQ ID NO: 2110
  Synthetic polynucleotide

SEQ ID NO: 2112 - DNA, 191 bp, Artificial Sequence
  Synthetic polynucleotide
atcatctcaccttgcctcctggtaagcccgaagtgcagcctgcaggagggaacagaatgttctgggcagaagggaacagaatgttctgggctcgagggaacagaatgttctgggcgacagggaacagaatgttctgggcctaagggaacagaatgttctgggcactggcgcgccatgcttcatcagactct

SEQ ID NO: 2113 - DNA, 191 bp, Artificial Sequence; identical to SEQ ID NO: 2112
  Synthetic polynucleotide

SEQ ID NO: 2114 - DNA, 164 bp, Artificial Sequence
  Synthetic polynucleotide
atcatctcaccttgcctcctggcgctcatcagcttactcctgcaggttaagtggaagattaagtggatcgttaagtggagacttaagtggactattaagtggaactttaagtggatgcttaagtggagtattaagtggaggcgcgccatgcttcatcagactct

SEQ ID NO: 2115 - DNA, 164 bp, Artificial Sequence; identical to SEQ ID NO: 2114
  Synthetic polynucleotide

SEQ ID NO: 2116 - DNA, 180 bp, Artificial Sequence
  Synthetic polynucleotide
atcatctcaccttgcctcctggtgtaatcattctcgatcctgcaggtctcacgcaagagatctcacgcaagtcgtctcacgcaaggactctcacgcaagctatctcacgcaagacttctcacgcaagtgctctcacgcaaggtatctcacgcaagggcgcgccatgcttcatcagactct

SEQ ID NO: 2117 - DNA, 180 bp, Artificial Sequence; identical to SEQ ID NO: 2116
  Synthetic polynucleotide

SEQ ID NO: 2118 - DNA, 196 bp, Artificial Sequence
  Synthetic polynucleotide
atcatctcaccttgcctcctgagagggcgtgctagtatcctgcaggttacttccttgtaagattacttccttgtatcgttacttccttgtagacttacttccttgtactattacttccttgtaactttacttccttgtatgcttacttccttgtagtattacttccttgtaggcgcgccatgcttcatcagactct

SEQ ID NO: 2119 - DNA, 196 bp, Artificial Sequence; identical to SEQ ID NO: 2118
  Synthetic polynucleotide

SEQ ID NO: 2120 - DNA, 185 bp, Artificial Sequence
  Synthetic polynucleotide
atcatctcaccttgcctcctgtgtgcggactatagcgccctgcaggttcttaattggtttttagattcttaattggttttttcgttcttaattggtttttgacttcttaattggtttttctattcttaattggtttttactttcttaattggttttttgcggcgcgccatgcttcatcagactct

SEQ ID NO: 2121 - DNA, 185 bp, Artificial Sequence; identical to SEQ ID NO: 2120
  Synthetic polynucleotide

SEQ ID NO: 2122 - DNA, 197 bp, Artificial Sequence
  Synthetic polynucleotide
atcatctcaccttgcctcctgagtcctcccatcgtctacctgcaggatgcccatatatggaagaatgcccatatatggatcgatgcccatatatggagacatgcccatatatggactaatgcccatatatggaactatgcccatatatggatgcatgcccatatatggagtaggcgcgccatgcttcatcagactct

SEQ ID NO: 2123 - DNA, 197 bp, Artificial Sequence; identical to SEQ ID NO: 2122
  Synthetic polynucleotide

SEQ ID NO: 2124 - DNA, 185 bp, Artificial Sequence
  Synthetic polynucleotide
atcatctcaccttgcctcctgtaggctgctgaatgtaccctgcaggctctaaaaataaccctagactctaaaaataacccttcgctctaaaaataaccctgacctctaaaaataaccctctactctaaaaataaccctactctctaaaaataacccttgcggcgcgccatgcttcatcagactct

SEQ ID NO: 2125 - DNA, 185 bp, Artificial Sequence; identical to SEQ ID NO: 2124
  Synthetic polynucleotide

SEQ ID NO: 2126 - DNA, 172 bp, Artificial Sequence
  Synthetic polynucleotide
atcatctcaccttgcctcctgagagtatctccagatcgcctgcaggcggaagtcgcagacggaagtcgctcgcggaagtcgcgaccggaagtcgcctacggaagtcgcactcggaagtcgctgccggaagtcgcgtacggaagtcgcggcgcgccatgcttcatcagactct

SEQ ID NO: 2127 - DNA, 172 bp, Artificial Sequence; identical to SEQ ID NO: 2126
  Synthetic polynucleotide

SEQ ID NO: 2128 - DNA, 180 bp, Artificial Sequence
  Synthetic polynucleotide
atcatctcaccttgcctcctgcggtgtcgttcattccgcctgcagggtcacgtgaccagagtcacgtgacctcggtcacgtgaccgacgtcacgtgaccctagtcacgtgaccactgtcacgtgacctgcgtcacgtgaccgtagtcacgtgaccggcgcgccatgcttcatcagactct

SEQ ID NO: 2129 - DNA, 180 bp, Artificial Sequence; identical to SEQ ID NO: 2128
  Synthetic polynucleotide

SEQ ID NO: 2130 - DNA, 156 bp, Artificial Sequence
  Synthetic polynucleotide
atcatctcaccttgcctcctgttacgtgccgaagtaaccctgcaggtaattgccagataattgcctcgtaattgccgactaattgccctataattgccacttaattgcctgctaattgccgtataattgccggcgcgccatgcttcatcagactct

SEQ ID NO: 2131 - DNA, 156 bp, Artificial Sequence; identical to SEQ ID NO: 2130
  Synthetic polynucleotide

SEQ ID NO: 2132 - DNA, 180 bp, Artificial Sequence
  Synthetic polynucleotide
atcatctcaccttgcctcctgtcggaagggcagttaagcctgcaggtatttccggttagatatttccggtttcgtatttccggttgactatttccggttctatatttccggttacttatttccggtttgctatttccggttgtatatttccggttggcgcgccatgcttcatcagactct

SEQ ID NO: 2133 - DNA, 180 bp, Artificial Sequence; identical to SEQ ID NO: 2132
  Synthetic polynucleotide

SEQ ID NO: 2134 - DNA, 140 bp, Artificial Sequence
  Synthetic polynucleotide
atcatctcaccttgcctcctgtaactttcgcgcgggcacctgcaggctaattagactaatttcgctaattgacctaattctactaattactctaatttgcctaattgtactaattggcgcgccatgcttcatcagactct

SEQ ID NO: 2135 - DNA, 140 bp, Artificial Sequence; identical to SEQ ID NO: 2134
  Synthetic polynucleotide

SEQ ID NO: 2136 - DNA, 185 bp, Artificial Sequence
  Synthetic polynucleotide
atcatctcaccttgcctcctgtgctactgtcgacttaccctgcagggggccgtgtgcaaaaaagagggccgtgtgcaaaaatcggggccgtgtgcaaaaagacgggccgtgtgcaaaaactagggccgtgtgcaaaaaactgggccgtgtgcaaaaatgcggcgcgccatgcttcatcagactct

SEQ ID NO: 2137 - DNA, 185 bp, Artificial Sequence; identical to SEQ ID NO: 2136
  Synthetic polynucleotide

SEQ ID NO: 2138 - DNA, 191 bp, Artificial Sequence
  Synthetic polynucleotide
atcatctcaccttgcctcctgcgcccatagccgattgacctgcaggtgtgctgagtcagcattagatgtgctgagtcagcatttcgtgtgctgagtcagcattgactgtgctgagtcagcattctatgtgctgagtcagcattacttgtgctgagtcagcatttgcggcgcgccatgcttcatcagactct

SEQ ID NO: 2139 - DNA, 191 bp, Artificial Sequence; identical to SEQ ID NO: 2138
  Synthetic polynucleotide

SEQ ID NO: 2140 - DNA, 188 bp, Artificial Sequence
  Synthetic polynucleotide
atcatctcaccttgcctcctgagtagaggtaggccattcctgcaggagggttaataaaagaagggttaataaatcgagggttaataaagacagggttaataaactaagggttaataaaactagggttaataaatgcagggttaataaagtaagggttaataaaggcgcgccatgcttcatcagactct

SEQ ID NO: 2141 - DNA, 188 bp, Artificial Sequence; identical to SEQ ID NO: 2140
  Synthetic polynucleotide

SEQ ID NO: 2142 - DNA, 196 bp, Artificial Sequence
  Synthetic polynucleotide
atcatctcaccttgcctcctggcgatttctgtcgctctcctgcaggttgtttatttacaagattgtttatttacatcgttgtttatttacagacttgtttatttacactattgtttatttacaactttgtttatttacatgcttgtttatttacagtattgtttatttacaggcgcgccatgcttcatcagactct

SEQ ID NO: 2143 - DNA, 196 bp, Artificial Sequence; identical to SEQ ID NO: 2142
  Synthetic polynucleotide

SEQ ID NO: 2144 - DNA, 191 bp, Artificial Sequence
  Synthetic polynucleotide
atcatctcaccttgcctcctgtcttctcggtgaaccaccctgcaggttcagcaccacggacagcgccagattcagcaccacggacagcgcctcgttcagcaccacggacagcgccgacttcagcaccacggacagcgccctattcagcaccacggacagcgccactggcgcgccatgcttcatcagactct

SEQ ID NO: 2145 - DNA, 191 bp, Artificial Sequence; identical to SEQ ID NO: 2144
  Synthetic polynucleotide

SEQ ID NO: 2146 - DNA, 172 bp, Artificial Sequence
  Synthetic polynucleotide
atcatctcaccttgcctcctggacttcgcccgctttagcctgcaggaccacctgttagaaccacctgtttcgaccacctgttgacaccacctgttctaaccacctgttactaccacctgtttgcaccacctgttgtaaccacctgttggcgcgccatgcttcatcagactct

SEQ ID NO: 2147 - DNA, 172 bp, Artificial Sequence; identical to SEQ ID NO: 2146
  Synthetic polynucleotide

SEQ ID NO: 2148 - DNA, 156 bp, Artificial Sequence
  Synthetic polynucleotide
atcatctcaccttgcctcctggtttatagggtgtcaggcctgcaggcttgtcaaagacttgtcaatcgcttgtcaagaccttgtcaactacttgtcaaactcttgtcaatgccttgtcaagtacttgtcaaggcgcgccatgcttcatcagactct

SEQ ID NO: 2149 - DNA, 156 bp, Artificial Sequence; identical to SEQ ID NO: 2148
  Synthetic polynucleotide

SEQ ID NO: 2150 - DNA, 188 bp, Artificial Sequence
  Synthetic polynucleotide
atcatctcaccttgcctcctgggtgcttcgctcgcaaacctgcagggggtctggcattagagggtctggcatttcggggtctggcattgacgggtctggcattctagggtctggcattactgggtctggcatttgcgggtctggcattgtagggtctggcattggcgcgccatgcttcatcagactct

SEQ ID NO: 2151 - DNA, 188 bp, Artificial Sequence; identical to SEQ ID NO: 2150
  Synthetic polynucleotide

SEQ ID NO: 2152 - DNA, 172 bp, Artificial Sequence
  Synthetic polynucleotide
atcatctcaccttgcctcctgctggctggtatatgtggcctgcaggccccgctgtgagaccccgctgtgtcgccccgctgtggacccccgctgtgctaccccgctgtgactccccgctgtgtgcccccgctgtggtaccccgctgtgggcgcgccatgcttcatcagactct

SEQ ID NO: 2153 - DNA, 172 bp, Artificial Sequence; identical to SEQ ID NO: 2152
  Synthetic polynucleotide

SEQ ID NO: 2154 - DNA, 172 bp, Artificial Sequence
  Synthetic polynucleotide
atcatctcaccttgcctcctgtttgcagataggtgtttcctgcaggggcgcgaaacagaggcgcgaaactcgggcgcgaaacgacggcgcgaaacctaggcgcgaaacactggcgcgaaactgcggcgcgaaacgtaggcgcgaaacggcgcgccatgcttcatcagactct

SEQ ID NO: 2155 - DNA, 172 bp, Artificial Sequence; identical to SEQ ID NO: 2154
  Synthetic polynucleotide

SEQ ID NO: 2156 - DNA, 188 bp, Artificial Sequence
  Synthetic polynucleotide
atcatctcaccttgcctcctgctggagtggtcacgtttcctgcaggacgcagctgcgcagaacgcagctgcgctcgacgcagctgcgcgacacgcagctgcgcctaacgcagctgcgcactacgcagctgcgctgcacgcagctgcgcgtaacgcagctgcgcggcgcgccatgcttcatcagactct

SEQ ID NO: 2157 - DNA, 188 bp, Artificial Sequence; identical to SEQ ID NO: 2156
  Synthetic polynucleotide

SEQ ID NO: 2158 - DNA, 185 bp, Artificial Sequence
  Synthetic polynucleotide
atcatctcaccttgcctcctgcccggacaggacattaacctgcaggctgggttaattaacgtagactgggttaattaacgttcgctgggttaattaacgtgacctgggttaattaacgtctactgggttaattaacgtactctgggttaattaacgttgcggcgcgccatgcttcatcagactct

SEQ ID NO: 2159 - DNA, 185 bp, Artificial Sequence; identical to SEQ ID NO: 2158
  Synthetic polynucleotide

SEQ ID NO: 2160 - DNA, 196 bp, Artificial Sequence
  Synthetic polynucleotide
atcatctcaccttgcctcctgtatccagcctccaaggacctgcaggtattacataaattagatattacataaatttcgtattacataaattgactattacataaattctatattacataaattacttattacataaatttgctattacataaattgtatattacataaattggcgcgccatgcttcatcagactct

SEQ ID NO: 2161 - DNA, 196 bp, Artificial Sequence; identical to SEQ ID NO: 2160
  Synthetic polynucleotide

SEQ ID NO: 2162 - DNA, 188 bp, Artificial Sequence
  Synthetic polynucleotide
atcatctcaccttgcctcctgcgactgttcgtacaatgcctgcaggggttacgtaatgagaggttacgtaatgtcgggttacgtaatggacggttacgtaatgctaggttacgtaatgactggttacgtaatgtgcggttacgtaatggtaggttacgtaatgggcgcgccatgcttcatcagactct

SEQ ID NO: 2163 - DNA, 188 bp, Artificial Sequence; identical to SEQ ID NO: 2162
  Synthetic polynucleotide

SEQ ID NO: 2164 - DNA, 180 bp, Artificial Sequence
  Synthetic polynucleotide
atcatctcaccttgcctcctggtcatccagcacgaaagcctgcagggtgactcagcaagagtgactcagcatcggtgactcagcagacgtgactcagcactagtgactcagcaactgtgactcagcatgcgtgactcagcagtagtgactcagcaggcgcgccatgcttcatcagactct

SEQ ID NO: 2165 - DNA, 180 bp, Artificial Sequence; identical to SEQ ID NO: 2164
  Synthetic polynucleotide

SEQ ID NO: 2166 - DNA, 188 bp, Artificial Sequence
  Synthetic polynucleotide
atcatctcaccttgcctcctggacccaacctaggcttccctgcaggaccggaagtgcaagaaccggaagtgcatcgaccggaagtgcagacaccggaagtgcactaaccggaagtgcaactaccggaagtgcatgcaccggaagtgcagtaaccggaagtgcaggcgcgccatgcttcatcagactct

SEQ ID NO: 2167 - DNA, 188 bp, Artificial Sequence; identical to SEQ ID NO: 2166
  Synthetic polynucleotide

SEQ ID NO: 2168 - DNA, 172 bp, Artificial Sequence
  Synthetic polynucleotide
atcatctcaccttgcctcctgcatgttctcgcatatgtcctgcaggaccacctgtcagaaccacctgtctcgaccacctgtcgacaccacctgtcctaaccacctgtcactaccacctgtctgcaccacctgtcgtaaccacctgtcggcgcgccatgcttcatcagactct

SEQ ID NO: 2169 - DNA, 172 bp, Artificial Sequence; identical to SEQ ID NO: 2168
  Synthetic polynucleotide

SEQ ID NO: 2170 - DNA, 164 bp, Artificial Sequence
  Synthetic polynucleotide
atcatctcaccttgcctcctgtcacacgtacgaccacgcctgcaggggccattaaagaggccattaatcgggccattaagacggccattaactaggccattaaactggccattaatgcggccattaagtaggccattaaggcgcgccatgcttcatcagactct

SEQ ID NO: 2171 - DNA, 164 bp, Artificial Sequence; identical to SEQ ID NO: 2170
  Synthetic polynucleotide

SEQ ID NO: 2172 - DNA, 180 bp, Artificial Sequence
  Synthetic polynucleotide
atcatctcaccttgcctcctgtggttacacagtatagtcctgcaggctaggtgtgaaagactaggtgtgaatcgctaggtgtgaagacctaggtgtgaactactaggtgtgaaactctaggtgtgaatgcctaggtgtgaagtactaggtgtgaaggcgcgccatgcttcatcagactct

SEQ ID NO: 2173 - DNA, 180 bp, Artificial Sequence; identical to SEQ ID NO: 2172
  Synthetic polynucleotide

SEQ ID NO: 2174 - DNA, 188 bp, Artificial Sequence
  Synthetic polynucleotide
atcatctcaccttgcctcctggggatccaaggtgcgatcctgcaggcgccccctgacaagacgccccctgacatcgcgccccctgacagaccgccccctgacactacgccccctgacaactcgccccctgacatgccgccccctgacagtacgccccctgacaggcgcgccatgcttcatcagactct

SEQ ID NO: 2175 - DNA, 188 bp, Artificial Sequence; identical to SEQ ID NO: 2174
  Synthetic polynucleotide

SEQ ID NO: 2176 - DNA, 148 bp, Artificial Sequence
  Synthetic polynucleotide
atcatctcaccttgcctcctgcacgtttctccaacagacctgcaggggttcatagaggttcattcgggttcatgacggttcatctaggttcatactggttcattgcggttcatgtaggttcatggcgcgccatgcttcatcagactct

SEQ ID NO: 2177 - DNA, 148 bp, Artificial Sequence; identical to SEQ ID NO: 2176
  Synthetic polynucleotide

SEQ ID NO: 2178 - DNA, 197 bp, Artificial Sequence
  Synthetic polynucleotide
atcatctcaccttgcctcctgttcgattgggatctttgcctgcagggtgccagcctatgccaacagagtgccagcctatgccaactcggtgccagcctatgccaacgacgtgccagcctatgccaacctagtgccagcctatgccaacactgtgccagcctatgccaactgcggcgcgccatgcttcatcagactct

SEQ ID NO: 2179 - DNA, 197 bp, Artificial Sequence; identical to SEQ ID NO: 2178
  Synthetic polynucleotide

SEQ ID NO: 2180 - DNA, 172 bp, Artificial Sequence
  Synthetic polynucleotide
atcatctcaccttgcctcctgacggccgtcgatctttacctgcaggttgtttacatagattgtttacattcgttgtttacatgacttgtttacatctattgtttacatactttgtttacattgcttgtttacatgtattgtttacatggcgcgccatgcttcatcagactct

SEQ ID NO: 2181 - DNA, 172 bp, Artificial Sequence; identical to SEQ ID NO: 2180
  Synthetic polynucleotide

SEQ ID NO: 2182 - DNA, 185 bp, Artificial Sequence
  Synthetic polynucleotide
atcatctcaccttgcctcctgcctgccgtacacatattcctgcaggctcagccaatcagcgcagactcagccaatcagcgctcgctcagccaatcagcgcgacctcagccaatcagcgcctactcagccaatcagcgcactctcagccaatcagcgctgcggcgcgccatgcttcatcagactct

SEQ ID NO: 2183 - DNA, 185 bp, Artificial Sequence; identical to SEQ ID NO: 2182
  Synthetic polynucleotide

SEQ ID NO: 2184 - DNA, 186 bp, Artificial Sequence
  Synthetic polynucleotide
atcatctcaccttgcctcctgcccttcgtgattgactgcctgcagggtgaccttacataaggtcacagagtgaccttacataaggtcactcggtgaccttacataaggtcacgacgtgaccttacataaggtcacctagtgaccttacataaggtcacactggcgcgccatgcttcatcagactct

SEQ ID NO: 2185 - DNA, 186 bp, Artificial Sequence; identical to SEQ ID NO: 2184
  Synthetic polynucleotide

SEQ ID NO: 2186 - DNA, 191 bp, Artificial Sequence
  Synthetic polynucleotide
atcatctcaccttgcctcctgagttcacgactcgtgagcctgcaggaggtcacggagaggtcaagaaggtcacggagaggtcatcgaggtcacggagaggtcagacaggtcacggagaggtcactaaggtcacggagaggtcaactaggtcacggagaggtcatgcggcgcgccatgcttcatcagactct

SEQ ID NO: 2187 - DNA, 191 bp, Artificial Sequence; identical to SEQ ID NO: 2186
  Synthetic polynucleotide

SEQ ID NO: 2188 - DNA, 156 bp, Artificial Sequence
  Synthetic polynucleotide
atcatctcaccttgcctcctgtaggagcacacttatcacctgcaggctgtttacagactgtttactcgctgtttacgacctgtttacctactgtttacactctgtttactgcctgtttacgtactgtttacggcgcgccatgcttcatcagactct

SEQ ID NO: 2189 - DNA, 156 bp, Artificial Sequence; identical to SEQ ID NO: 2188
  Synthetic polynucleotide

SEQ ID NO: 2190 - DNA, 197 bp, Artificial Sequence
  Synthetic polynucleotide
atcatctcaccttgcctcctggggtggtcgaactagttcctgcagggcgccctctggtggcagagcgccctctggtggctcggcgccctctggtggcgacgcgccctctggtggcctagcgccctctggtggcactgcgccctctggtggctgcgcgccctctggtggcgtaggcgcgccatgcttcatcagactct

SEQ ID NO: 2191 - DNA, 197 bp, Artificial Sequence; identical to SEQ ID NO: 2190
  Synthetic polynucleotide

SEQ ID NO: 2192 - DNA, 172 bp, Artificial Sequence
  Synthetic polynucleotide
atcatctcaccttgcctcctggtactcacaggctttctcctgcaggtgagtgacagagatgagtgacagtcgtgagtgacaggactgagtgacagctatgagtgacagacttgagtgacagtgctgagtgacaggtatgagtgacagggcgcgccatgcttcatcagactct

SEQ ID NO: 2193 - DNA, 172 bp, Artificial Sequence; identical to SEQ ID NO: 2192
  Synthetic polynucleotide

SEQ ID NO: 2194 - DNA, 164 bp, Artificial Sequence
  Synthetic polynucleotide
atcatctcaccttgcctcctgatggcctggctcaattccctgcagggggtatcatagagggtatcattcggggtatcatgacgggtatcatctagggtatcatactgggtatcattgcgggtatcatgtagggtatcatggcgcgccatgcttcatcagactct

SEQ ID NO: 2195 - DNA, 164 bp, Artificial Sequence; identical to SEQ ID NO: 2194
  Synthetic polynucleotide

SEQ ID NO: 2196 - DNA, 191 bp, Artificial Sequence
  Synthetic polynucleotide
atcatctcaccttgcctcctgctttagagttgtggtgtcctgcaggagcagttaataattaaccataagaagcagttaataattaaccatatcgagcagttaataattaaccatagacagcagttaataattaaccatactaagcagttaataattaaccataactggcgcgccatgcttcatcagactct

SEQ ID NO: 2197 - DNA, 191 bp, Artificial Sequence; identical to SEQ ID NO: 2196
  Synthetic polynucleotide

SEQ ID NO: 2198 - DNA, 200 bp, Artificial Sequence
  Synthetic polynucleotide
atcatctcaccttgcctcctgttacactatgttcagcgcctgcagggatgactcatatcgaaactagagatgactcatatcgaaacttcggatgactcatatcgaaactgacgatgactcatatcgaaactctagatgactcatatcgaaactactgatgactcatatcgaaactggcgcgccatgcttcatcagactct

SEQ ID NO: 2199 - DNA, 200 bp, Artificial Sequence; identical to SEQ ID NO: 2198
  Synthetic polynucleotide

SEQ ID NO: 2200 - DNA, 172 bp, Artificial Sequence
  Synthetic polynucleotide
atcatctcaccttgcctcctgaagaagtaaacaggcagcctgcaggataattaataagaataattaatatcgataattaatagacataattaatactaataattaataactataattaatatgcataattaatagtaataattaataggcgcgccatgcttcatcagactct

SEQ ID NO: 2201 - DNA, 172 bp, Artificial Sequence; identical to SEQ ID NO: 2200
  Synthetic polynucleotide

SEQ ID NO: 2202 - DNA, 172 bp, Artificial Sequence
  Synthetic polynucleotide
atcatctcaccttgcctcctggtatactttatcgctgccctgcaggtctcgcgagaagatctcgcgagatcgtctcgcgagagactctcgcgagactatctcgcgagaacttctcgcgagatgctctcgcgagagtatctcgcgagaggcgcgccatgcttcatcagactct

SEQ ID NO: 2203 - DNA, 172 bp, Artificial Sequence; identical to SEQ ID NO: 2202
  Synthetic polynucleotide

SEQ ID NO: 2204 - DNA, 197 bp, Artificial Sequence
  Synthetic polynucleotide
atcatctcaccttgcctcctgcattcagactgccggtgcctgcaggtatcttatcttatctagatatcttatcttatcttcgtatcttatcttatctgactatcttatcttatctctatatcttatcttatctacttatcttatcttatcttgctatcttatcttatctgtaggcgcgccatgcttcatcagactct

SEQ ID NO: 2205 - DNA, 197 bp, Artificial Sequence; identical to SEQ ID NO: 2204
  Synthetic polynucleotide

SEQ ID NO: 2206 - DNA, 164 bp, Artificial Sequence
  Synthetic polynucleotide
atcatctcaccttgcctcctgcatgcggagtatccgaccctgcaggctcaagtggagactcaagtggtcgctcaagtgggacctcaagtggctactcaagtggactctcaagtggtgcctcaagtgggtactcaagtggggcgcgccatgcttcatcagactct

SEQ ID NO: 2207 - DNA, 164 bp, Artificial Sequence; identical to SEQ ID NO: 2206
  Synthetic polynucleotide

SEQ ID NO: 2208 - DNA, 188 bp, Artificial Sequence
  Synthetic polynucleotide
atcatctcaccttgcctcctgaatctccggctagggtccctgcaggcaagacgccttaagacaagacgccttatcgcaagacgccttagaccaagacgccttactacaagacgccttaactcaagacgccttatgccaagacgccttagtacaagacgccttaggcgcgccatgcttcatcagactct

SEQ ID NO: 2209 - DNA, 188 bp, Artificial Sequence; identical to SEQ ID NO: 2208
  Synthetic polynucleotide

SEQ ID NO: 2210 - DNA, 196 bp, Artificial Sequence
  Synthetic polynucleotide
atcatctcaccttgcctcctgtgcgacacgtattgaggcctgcaggctaatttaattaaagactaatttaattaatcgctaatttaattaagacctaatttaattaactactaatttaattaaactctaatttaattaatgcctaatttaattaagtactaatttaattaaggcgcgccatgcttcatcagactct

SEQ ID NO: 2211 - DNA, 196 bp, Artificial Sequence; identical to SEQ ID NO: 2210
  Synthetic polynucleotide

SEQ ID NO: 2212 - DNA, 164 bp, Artificial Sequence
  Synthetic polynucleotide
atcatctcaccttgcctcctgaccatgtcgggtttaaccctgcaggcgctgttaaagacgctgttaatcgcgctgttaagaccgctgttaactacgctgttaaactcgctgttaatgccgctgttaagtacgctgttaaggcgcgccatgcttcatcagactct

SEQ ID NO: 2213 - DNA, 164 bp, Artificial Sequence; identical to SEQ ID NO: 2212
  Synthetic polynucleotide

SEQ ID NO: 2214 - DNA, 156 bp, Artificial Sequence
  Synthetic polynucleotide
atcatctcaccttgcctcctgtccgactagctccggaacctgcaggagaggaagagaagaggaagtcgagaggaaggacagaggaagctaagaggaagactagaggaagtgcagaggaaggtaagaggaagggcgcgccatgcttcatcagactct

SEQ ID NO: 2215 - DNA, 156 bp, Artificial Sequence; identical to SEQ ID NO: 2214
  Synthetic polynucleotide

SEQ ID NO: 2216 - DNA, 172 bp, Artificial Sequence
  Synthetic polynucleotide
atcatctcaccttgcctcctgtttcgctcaggcgatgacctgcagggctcaagtgcagagctcaagtgctcggctcaagtgcgacgctcaagtgcctagctcaagtgcactgctcaagtgctgcgctcaagtgcgtagctcaagtgcggcgcgccatgcttcatcagactct

SEQ ID NO: 2217 - DNA, 172 bp, Artificial Sequence; identical to SEQ ID NO: 2216
  Synthetic polynucleotide

SEQ ID NO: 2218 - DNA, 172 bp, Artificial Sequence
  Synthetic polynucleotide
atcatctcaccttgcctcctgtagtcttcccaagctaccctgcaggggtgccaagtagaggtgccaagttcgggtgccaagtgacggtgccaagtctaggtgccaagtactggtgccaagttgcggtgccaagtgtaggtgccaagtggcgcgccatgcttcatcagactct

SEQ ID NO: 2219 - DNA, 172 bp, Artificial Sequence; identical to SEQ ID NO: 2218
  Synthetic polynucleotide

SEQ ID NO: 2220 - DNA, 164 bp, Artificial Sequence
  Synthetic polynucleotide
atcatctcaccttgcctcctgctatccattcctcttgccctgcaggtcatcagttagatcatcagtttcgtcatcagttgactcatcagttctatcatcagttacttcatcagtttgctcatcagttgtatcatcagttggcgcgccatgcttcatcagactct

SEQ ID NO: 2221 - DNA, 164 bp, Artificial Sequence; identical to SEQ ID NO: 2220
  Synthetic polynucleotide

SEQ ID NO: 2222 - DNA, 172 bp, Artificial Sequence
  Synthetic polynucleotide
atcatctcaccttgcctcctggggaatgagtggcaatacctgcaggattcaaatctagaattcaaatcttcgattcaaatctgacattcaaatctctaattcaaatctactattcaaatcttgcattcaaatctgtaattcaaatctggcgcgccatgcttcatcagactct

SEQ ID NO: 2223 - DNA, 172 bp, Artificial Sequence; identical to SEQ ID NO: 2222
  Synthetic polynucleotide

SEQ ID NO: 2224 - DNA, 197 bp, Artificial Sequence
  Synthetic polynucleotide
atcatctcaccttgcctcctggcgagttggaggaaacccctgcaggtcacccccttgacccagatcacccccttgaccctcgtcacccccttgacccgactcacccccttgacccctatcacccccttgacccacttcacccccttgaccctgctcacccccttgacccgtaggcgcgccatgcttcatcagactct

SEQ ID NO: 2225 - DNA, 197 bp, Artificial Sequence; identical to SEQ ID NO: 2224
  Synthetic polynucleotide

SEQ ID NO: 2226 - DNA, 196 bp, Artificial Sequence
  Synthetic polynucleotide
atcatctcaccttgcctcctgagccttgatcgaacccgcctgcaggctaatttaattagagactaatttaattagtcgctaatttaattaggacctaatttaattagctactaatttaattagactctaatttaattagtgcctaatttaattaggtactaatttaattagggcgcgccatgcttcatcagactct

SEQ ID NO: 2227 - DNA, 196 bp, Artificial Sequence; identical to SEQ ID NO: 2226
  Synthetic polynucleotide

SEQ ID NO: 2228 - DNA, 197 bp, Artificial Sequence
  Synthetic polynucleotide
atcatctcaccttgcctcctgaacgccagatctagtcgcctgcagggggtcaacgagttcaagagggtcaacgagttcatcggggtcaacgagttcagacgggtcaacgagttcactagggtcaacgagttcaactgggtcaacgagttcatgcgggtcaacgagttcagtaggcgcgccatgcttcatcagactct

SEQ ID NO: 2229 - DNA, 197 bp, Artificial Sequence; identical to SEQ ID NO: 2228
  Synthetic polynucleotide

SEQ ID NO: 2230 - DNA, 164 bp, Artificial Sequence
  Synthetic polynucleotide
atcatctcaccttgcctcctgccctaaacttggtcgaacctgcaggaagtttcacagaaagtttcactcgaagtttcacgacaagtttcacctaaagtttcacactaagtttcactgcaagtttcacgtaaagtttcacggcgcgccatgcttcatcagactct

SEQ ID NO: 2231 - DNA, 164 bp, Artificial Sequence; identical to SEQ ID NO: 2230
  Synthetic polynucleotide

SEQ ID NO: 2232 - DNA, 197 bp, Artificial Sequence
  Synthetic polynucleotide
atcatctcaccttgcctcctgtcgtacttacggttgggcctgcaggggttaattattaaccagaggttaattattaacctcgggttaattattaaccgacggttaattattaaccctaggttaattattaaccactggttaattattaacctgcggttaattattaaccgtaggcgcgccatgcttcatcagactct

SEQ ID NO: 2233 - DNA, 197 bp, Artificial Sequence; identical to SEQ ID NO: 2232
  Synthetic polynucleotide

SEQ ID NO: 2234 - DNA, 196 bp, Artificial Sequence
  Synthetic polynucleotide
atcatctcaccttgcctcctgataattccgcacgtgcacctgcaggcgccctctggtggagacgccctctggtggtcgcgccctctggtgggaccgccctctggtggctacgccctctggtggactcgccctctggtggtgccgccctctggtgggtacgccctctggtggggcgcgccatgcttcatcagactct

SEQ ID NO: 2235 - DNA, 196 bp, Artificial Sequence; identical to SEQ ID NO: 2234
  Synthetic polynucleotide

SEQ ID NO: 2236 - DNA, 180 bp, Artificial Sequence
  Synthetic polynucleotide
atcatctcaccttgcctcctgaggtccactaagcgtaccctgcagggtccgccattaagagtccgccattatcggtccgccattagacgtccgccattactagtccgccattaactgtccgccattatgcgtccgccattagtagtccgccattaggcgcgccatgcttcatcagactct

SEQ ID NO: 2237 - DNA, 180 bp, Artificial Sequence; identical to SEQ ID NO: 2236
  Synthetic polynucleotide

SEQ ID NO: 2238 - DNA, 172 bp, Artificial Sequence
  Synthetic polynucleotide
atcatctcaccttgcctcctgatacccaccttacgacccctgcagggttgtgcaatagagttgtgcaattcggttgtgcaatgacgttgtgcaatctagttgtgcaatactgttgtgcaattgcgttgtgcaatgtagttgtgcaatggcgcgccatgcttcatcagactct

SEQ ID NO: 2239 - DNA, 172 bp, Artificial Sequence; identical to SEQ ID NO: 2238
  Synthetic polynucleotide

SEQ ID NO: 2240 - DNA, 180 bp, Artificial Sequence
  Synthetic polynucleotide
atcatctcaccttgcctcctgacgatttcacatcccttcctgcagggggagataagaagagggagataagatcggggagataagagacgggagataagactagggagataagaactgggagataagatgcgggagataagagtagggagataagaggcgcgccatgcttcatcagactct

SEQ ID NO: 2241 - DNA, 180 bp, Artificial Sequence; identical to SEQ ID NO: 2240
  Synthetic polynucleotide

SEQ ID NO: 2242 - DNA, 191 bp, Artificial Sequence
  Synthetic polynucleotide
atcatctcaccttgcctcctgccaatcctgtttcccaccctgcaggtttcgcctggcacgtcaagatttcgcctggcacgtcatcgtttcgcctggcacgtcagactttcgcctggcacgtcactatttcgcctggcacgtcaacttttcgcctggcacgtcatgcggcgcgccatgcttcatcagactct

SEQ ID NO: 2243 - DNA, 191 bp, Artificial Sequence; identical to SEQ ID NO: 2242
  Synthetic polynucleotide

SEQ ID NO: 2244 - DNA, 172 bp, Artificial Sequence
  Synthetic polynucleotide
atcatctcaccttgcctcctgatgacgtctggtatagacctgcaggcgcacgtggcagacgcacgtggctcgcgcacgtggcgaccgcacgtggcctacgcacgtggcactcgcacgtggctgccgcacgtggcgtacgcacgtggcggcgcgccatgcttcatcagactct

SEQ ID NO: 2245 - DNA, 172 bp, Artificial Sequence; identical to SEQ ID NO: 2244
  Synthetic polynucleotide

SEQ ID NO: 2246 - DNA, 164 bp, Artificial Sequence
  Synthetic polynucleotide
atcatctcaccttgcctcctggggacggagaatctgagcctgcaggcatagcaacagacatagcaactcgcatagcaacgaccatagcaacctacatagcaacactcatagcaactgccatagcaacgtacatagcaacggcgcgccatgcttcatcagactct

SEQ ID NO: 2247 - DNA, 164 bp, Artificial Sequence; identical to SEQ ID NO: 2246
  Synthetic polynucleotide

SEQ ID NO: 2248 - DNA, 197 bp, Artificial Sequence
  Synthetic polynucleotide
atcatctcaccttgcctcctggagcagttccatccaatcctgcaggaaccaagatggcggcagaaaccaagatggcggctcgaaccaagatggcggcgacaaccaagatggcggcctaaaccaagatggcggcactaaccaagatggcggctgcaaccaagatggcggcgtaggcgcgccatgcttcatcagactct

SEQ ID NO: 2249 - DNA, 197 bp, Artificial Sequence; identical to SEQ ID NO: 2248
  Synthetic polynucleotide

SEQ ID NO: 2250 - DNA, 197 bp, Artificial Sequence
  Synthetic polynucleotide
atcatctcaccttgcctcctgtattctgcctgagtcggcctgcagggacactgtaacaaaaagagacactgtaacaaaatcggacactgtaacaaaagacgacactgtaacaaaactagacactgtaacaaaaactgacactgtaacaaaatgcgacactgtaacaaaagtaggcgcgccatgcttcatcagactct

SEQ ID NO: 2251 - DNA, 197 bp, Artificial Sequence; identical to SEQ ID NO: 2250
  Synthetic polynucleotide

SEQ ID NO: 2252 - DNA, 190 bp, Artificial Sequence
  Synthetic polynucleotide
atcatctcaccttgcctcctgtatgacgacattgatagcctgcaggttgacctacttataagattgacctacttatatcgttgacctacttatagacttgacctacttatactattgacctacttataactttgacctacttatatgcttgacctacttatagtaggcgcgccatgcttcatcagactct

SEQ ID NO: 2253 - DNA, 190 bp, Artificial Sequence; identical to SEQ ID NO: 2252
  Synthetic polynucleotide

SEQ ID NO: 2254 - DNA, 172 bp, Artificial Sequence
  Synthetic polynucleotide
atcatctcaccttgcctcctgccaagtgtgtccaggtgcctgcagggcgtgggcggagagcgtgggcggtcggcgtgggcgggacgcgtgggcggctagcgtgggcggactgcgtgggcggtgcgcgtgggcgggtagcgtgggcggggcgcgccatgcttcatcagactct

SEQ ID NO: 2255 - DNA, 172 bp, Artificial Sequence; identical to SEQ ID NO: 2254
  Synthetic polynucleotide

SEQ ID NO: 2256 - DNA, 190 bp, Artificial Sequence
  Synthetic polynucleotide
atcatctcaccttgcctcctgctgattcctcgtagtatcctgcagggcacccaagggtgcagagcacccaagggtgctcggcacccaagggtgcgacgcacccaagggtgcctagcacccaagggtgcactgcacccaagggtgctgcgcacccaagggtgcgtaggcgcgccatgcttcatcagactct

SEQ ID NO: 2257 - DNA, 190 bp, Artificial Sequence; identical to SEQ ID NO: 2256
  Synthetic polynucleotide

SEQ ID NO: 2258 - DNA, 172 bp, Artificial Sequence
  Synthetic polynucleotide
atcatctcaccttgcctcctgtgccttattgcgtaagccctgcaggtcgtaaacaaagatcgtaaacaatcgtcgtaaacaagactcgtaaacaactatcgtaaacaaacttcgtaaacaatgctcgtaaacaagtatcgtaaacaaggcgcgccatgcttcatcagactct

SEQ ID NO: 2259 - DNA, 172 bp, Artificial Sequence; identical to SEQ ID NO: 2258
  Synthetic polynucleotide

SEQ ID NO: 2260 - DNA, 180 bp, Artificial Sequence
  Synthetic polynucleotide
atcatctcaccttgcctcctgcgacacgtagagacctccctgcaggggatttccggtagaggatttccggttcgggatttccggtgacggatttccggtctaggatttccggtactggatttccggttgcggatttccggtgtaggatttccggtggcgcgccatgcttcatcagactct

SEQ ID NO: 2261 - DNA, 180 bp, Artificial Sequence; identical to SEQ ID NO: 2260
  Synthetic polynucleotide

SEQ ID NO: 2262 - DNA, 197 bp, Artificial Sequence
  Synthetic polynucleotide
atcatctcaccttgcctcctgcgatagtaccactttagcctgcaggcaaaagtaaacaaagagacaaaagtaaacaaagtcgcaaaagtaaacaaaggaccaaaagtaaacaaagctacaaaagtaaacaaagactcaaaagtaaacaaagtgccaaaagtaaacaaaggtaggcgcgccatgcttcatcagactct

SEQ ID NO: 2263 - DNA, 197 bp, Artificial Sequence; identical to SEQ ID NO: 2262
  Synthetic polynucleotide

SEQ ID NO: 2264 - DNA, 190 bp, Artificial Sequence
  Synthetic polynucleotide
atcatctcaccttgcctcctgcgaattggttcgctagtcctgcaggatgccacgtcatcaagaatgccacgtcatcatcgatgccacgtcatcagacatgccacgtcatcactaatgccacgtcatcaactatgccacgtcatcatgcatgccacgtcatcagtaggcgcgccatgcttcatcagactct

SEQ ID NO: 2265 - DNA, 190 bp, Artificial Sequence; identical to SEQ ID NO: 2264
  Synthetic polynucleotide

SEQ ID NO: 2266 - DNA, 156 bp, Artificial Sequence
  Synthetic polynucleotide
atcatctcaccttgcctcctgcgatacgcattcctgaacctgcaggaataaaaaagaaataaaaatcgaataaaaagacaataaaaactaaataaaaaactaataaaaatgcaataaaaagtaaataaaaaggcgcgccatgcttcatcagactct

SEQ ID NO: 2267 - DNA, 156 bp, Artificial Sequence; identical to SEQ ID NO: 2266
  Synthetic polynucleotide

SEQ ID NO: 2268 - DNA, 188 bp, Artificial Sequence
  Synthetic polynucleotide
atcatctcaccttgcctcctgatgagcgtcaacagtcgcctgcaggatttcctcttatagaatttcctcttattcgatttcctcttatgacatttcctcttatctaatttcctcttatactatttcctcttattgcatttcctcttatgtaatttcctcttatggcgcgccatgcttcatcagactct

SEQ ID NO: 2269 - DNA, 188 bp, Artificial Sequence; identical to SEQ ID NO: 2268
  Synthetic polynucleotide

SEQ ID NO: 2270 - DNA, 180 bp, Artificial Sequence
  Synthetic polynucleotide
atcatctcaccttgcctcctgcacctctgctgactatgcctgcagggtcagcaaattagagtcagcaaatttcggtcagcaaattgacgtcagcaaattctagtcagcaaattactgtcagcaaatttgcgtcagcaaattgtagtcagcaaattggcgcgccatgcttcatcagactct

SEQ ID NO: 2271 - DNA, 180 bp, Artificial Sequence; identical to SEQ ID NO: 2270
  Synthetic polynucleotide

SEQ ID NO: 2272 - DNA, 180 bp, Artificial Sequence
  Synthetic polynucleotide
atcatctcaccttgcctcctggtacagtcctaattccccctgcagggatgagtcaccagagatgagtcacctcggatgagtcaccgacgatgagtcaccctagatgagtcaccactgatgagtcacctgcgatgagtcaccgtagatgagtcaccggcgcgccatgcttcatcagactct

SEQ ID NO: 2273 - DNA, 180 bp, Artificial Sequence; identical to SEQ ID NO: 2272
  Synthetic polynucleotide

SEQ ID NO: 2274 - DNA, 172 bp, Artificial Sequence
  Synthetic polynucleotide
atcatctcaccttgcctcctgctccatccactgtttctcctgcaggtgtccatggtagatgtccatggttcgtgtccatggtgactgtccatggtctatgtccatggtacttgtccatggttgctgtccatggtgtatgtccatggtggcgcgccatgcttcatcagactct

SEQ ID NO: 2275 - DNA, 172 bp, Artificial Sequence; identical to SEQ ID NO: 2274
  Synthetic polynucleotide

SEQ ID NO: 2276 - DNA, 185 bp, Artificial Sequence
  Synthetic polynucleotide
atcatctcaccttgcctcctgtaagacgttctgtgaggcctgcaggaccaagtaattcctagagaaccaagtaattcctagtcgaccaagtaattcctaggacaccaagtaattcctagctaaccaagtaattcctagactaccaagtaattcctagtgcggcgcgccatgcttcatcagactct

SEQ ID NO: 2277 - DNA, 185 bp, Artificial Sequence; identical to SEQ ID NO: 2276
  Synthetic polynucleotide

SEQ ID NO: 2278 - DNA, 191 bp, Artificial Sequence
  Synthetic polynucleotide
atcatctcaccttgcctcctgatgcgttgccatggcaacctgcaggcaaattaattaataaaaagacaaattaattaataaaatcgcaaattaattaataaaagaccaaattaattaataaaactacaaattaattaataaaaactcaaattaattaataaaatgcggcgcgccatgcttcatcagactct

SEQ ID NO: 2279 - DNA, 191 bp, Artificial Sequence; identical to SEQ ID NO: 2278
  Synthetic polynucleotide

SEQ ID NO: 2280 - DNA, 190 bp, Artificial Sequence
  Synthetic polynucleotide
atcatctcaccttgcctcctgcacatagctgcgaatcgcctgcaggatgcattacataacagaatgcattacataactcgatgcattacataacgacatgcattacataacctaatgcattacataacactatgcattacataactgcatgcattacataacgtaggcgcgccatgcttcatcagactct

SEQ ID NO: 2281 - DNA, 190 bp, Artificial Sequence; identical to SEQ ID NO: 2280
  Synthetic polynucleotide

SEQ ID NO: 2282 - DNA, 148 bp, Artificial Sequence
  Synthetic polynucleotide
atcatctcaccttgcctcctgatttccgccttgagccccctgcaggagcaaacagaagcaaactcgagcaaacgacagcaaacctaagcaaacactagcaaactgcagcaaacgtaagcaaacggcgcgccatgcttcatcagactct

SEQ ID NO: 2283 - DNA, 148 bp, Artificial Sequence; identical to SEQ ID NO: 2282
  Synthetic polynucleotide

SEQ ID NO: 2284 - DNA, 190 bp, Artificial Sequence
  Synthetic polynucleotide
atcatctcaccttgcctcctggatggcaactcttactccctgcaggtggggtttgtggttagatggggtttgtggtttcgtggggtttgtggttgactggggtttgtggttctatggggtttgtggttacttggggtttgtggtttgctggggtttgtggttgtaggcgcgccatgcttcatcagactct

SEQ ID NO: 2285 - DNA, 190 bp, Artificial Sequence; identical to SEQ ID NO: 2284
  Synthetic polynucleotide

SEQ ID NO: 2286 - DNA, 197 bp, Artificial Sequence
  Synthetic polynucleotide
atcatctcaccttgcctcctgcttgcaacttcgacgcgcctgcaggctggccatatatggcagactggccatatatggctcgctggccatatatggcgacctggccatatatggcctactggccatatatggcactctggccatatatggctgcctggccatatatggcgtaggcgcgccatgcttcatcagactct

SEQ ID NO: 2287 - DNA, 197 bp, Artificial Sequence; identical to SEQ ID NO: 2286
  Synthetic polynucleotide

SEQ ID NO: 2288 - DNA, 180 bp, Artificial Sequence
  Synthetic polynucleotide
atcatctcaccttgcctcctggggtcaaagtgatgcgacctgcaggctgagtaaacaagactgagtaaacatcgctgagtaaacagacctgagtaaacactactgagtaaacaactctgagtaaacatgcctgagtaaacagtactgagtaaacaggcgcgccatgcttcatcagactct

SEQ ID NO: 2289 - DNA, 180 bp, Artificial Sequence; identical to SEQ ID NO: 2288
  Synthetic polynucleotide

SEQ ID NO: 2290 - DNA, 188 bp, Artificial Sequence
  Synthetic polynucleotide
atcatctcaccttgcctcctgcccttctcagagcacaacctgcaggcggaggaatgtgagacggaggaatgtgtcgcggaggaatgtggaccggaggaatgtgctacggaggaatgtgactcggaggaatgtgtgccggaggaatgtggtacggaggaatgtgggcgcgccatgcttcatcagactct

SEQ ID NO: 2291 - DNA, 188 bp, Artificial Sequence; identical to SEQ ID NO: 2290
  Synthetic polynucleotide

SEQ ID NO: 2292 - DNA, 180 bp, Artificial Sequence
  Synthetic polynucleotide
atcatctcaccttgcctcctgctcaggcacaagagtgtcctgcaggttatgtaacatagattatgtaacattcgttatgtaacatgacttatgtaacatctattatgtaacatactttatgtaacattgcttatgtaacatgtattatgtaacatggcgcgccatgcttcatcagactct

SEQ ID NO: 2293 - DNA, 180 bp, Artificial Sequence; identical to SEQ ID NO: 2292
  Synthetic polynucleotide

SEQ ID NO: 2294 - DNA, 191 bp, Artificial Sequence
  Synthetic polynucleotide
atcatctcaccttgcctcctgcaatggtcagttatcgtcctgcaggtttggccactagggggcactaagatttggccactagggggcactatcgtttggccactagggggcactagactttggccactagggggcactactatttggccactagggggcactaactggcgcgccatgcttcatcagactct

SEQ ID NO: 2295 - DNA, 191 bp, Artificial Sequence; identical to SEQ ID NO: 2294
  Synthetic polynucleotide

SEQ ID NO: 2296 - DNA, 197 bp, Artificial Sequence
  Synthetic polynucleotide
atcatctcaccttgcctcctgaatcattgggtgtctttcctgcaggcattttggcgccatttttagacattttggcgccattttttcgcattttggcgccatttttgaccattttggcgccatttttctacattttggcgccatttttactcattttggcgccattttttgcggcgcgccatgcttcatcagactct

SEQ ID NO: 2297 - DNA, 197 bp, Artificial Sequence; identical to SEQ ID NO: 2296
  Synthetic polynucleotide

SEQ ID NO: 2298 - DNA, 172 bp, Artificial Sequence
  Synthetic polynucleotide
atcatctcaccttgcctcctgtcttcgtcctattcgcgcctgcaggtttccgggaaagatttccgggaatcgtttccgggaagactttccgggaactatttccgggaaacttttccgggaatgctttccgggaagtatttccgggaaggcgcgccatgcttcatcagactct

SEQ ID NO: 2299 - DNA, 172 bp, Artificial Sequence; identical to SEQ ID NO: 2298
  Synthetic polynucleotide

SEQ ID NO: 2300 - DNA, 164 bp, Artificial Sequence
  Synthetic polynucleotide
atcatctcaccttgcctcctgaggagtcgggtagactgcctgcaggaccagcaggagaaccagcaggtcgaccagcagggacaccagcaggctaaccagcaggactaccagcaggtgcaccagcagggtaaccagcaggggcgcgccatgcttcatcagactct

SEQ ID NO: 2301 - DNA, 164 bp, Artificial Sequence; identical to SEQ ID NO: 2300
  Synthetic polynucleotide

SEQ ID NO: 2302 - DNA, 188 bp, Artificial Sequence
  Synthetic polynucleotide
atcatctcaccttgcctcctggagtgcatgggtcattgcctgcagggaccccccgctgagagaccccccgctgtcggaccccccgctggacgaccccccgctgctagaccccccgctgactgaccccccgctgtgcgaccccccgctggtagaccccccgctgggcgcgccatgcttcatcagactct

SEQ ID NO: 2303 - DNA, 188 bp, Artificial Sequence; identical to SEQ ID NO: 2302
  Synthetic polynucleotide

SEQ ID NO: 2304 - DNA, 156 bp, Artificial Sequence
  Synthetic polynucleotide
atcatctcaccttgcctcctgctttgagcccttcacttcctgcaggtaattggtagataattggttcgtaattggtgactaattggtctataattggtacttaattggttgctaattggtgtataattggtggcgcgccatgcttcatcagactct

SEQ ID NO: 2305 - DNA, 156 bp, Artificial Sequence; identical to SEQ ID NO: 2304
  Synthetic polynucleotide

SEQ ID NO: 2306 - DNA, 172 bp, Artificial Sequence
  Synthetic polynucleotide
atcatctcaccttgcctcctgtttggatttgtacttcgcctgcaggcccgccccttagacccgcccctttcgcccgccccttgaccccgccccttctacccgccccttactcccgcccctttgccccgccccttgtacccgccccttggcgcgccatgcttcatcagactct

SEQ ID NO: 2307 - DNA, 172 bp, Artificial Sequence; identical to SEQ ID NO: 2306
  Synthetic polynucleotide

SEQ ID NO: 2308 - DNA, 186 bp, Artificial Sequence
  Synthetic polynucleotide
atcatctcaccttgcctcctgagagaccaatagactgacctgcaggcatttccgaattgggaaacaagacatttccgaattgggaaacatcgcatttccgaattgggaaacagaccatttccgaattgggaaacactacatttccgaattgggaaacaactggcgcgccatgcttcatcagactct

SEQ ID NO: 2309 - DNA, 186 bp, Artificial Sequence; identical to SEQ ID NO: 2308
  Synthetic polynucleotide

SEQ ID NO: 2310 - DNA, 197 bp, Artificial Sequence
  Synthetic polynucleotide
atcatctcaccttgcctcctgtttgcgtttacttcaaccctgcaggaaaggtcatgtgaggtcaagaaaaggtcatgtgaggtcatcgaaaggtcatgtgaggtcagacaaaggtcatgtgaggtcactaaaaggtcatgtgaggtcaactaaaggtcatgtgaggtcatgcggcgcgccatgcttcatcagactct

SEQ ID NO: 2311 - DNA, 197 bp, Artificial Sequence; identical to SEQ ID NO: 2310
  Synthetic polynucleotide

SEQ ID NO: 2312 - DNA, 190 bp, Artificial Sequence
  Synthetic polynucleotide
atcatctcaccttgcctcctgtacgtctttaccctcagcctgcaggggcagcgggtgcagagaggcagcgggtgcagtcgggcagcgggtgcaggacggcagcgggtgcagctaggcagcgggtgcagactggcagcgggtgcagtgcggcagcgggtgcaggtaggcgcgccatgcttcatcagactct

SEQ ID NO: 2313 - DNA, 190 bp, Artificial Sequence; identical to SEQ ID NO: 2312
  Synthetic polynucleotide

SEQ ID NO: 2314 - DNA, 172 bp, Artificial Sequence
  Synthetic polynucleotide
atcatctcaccttgcctcctgtattcgcactcatccgtcctgcagggcccataaaaagagcccataaaatcggcccataaaagacgcccataaaactagcccataaaaactgcccataaaatgcgcccataaaagtagcccataaaaggcgcgccatgcttcatcagactct

SEQ ID NO: 2315 - DNA, 172 bp, Artificial Sequence; identical to SEQ ID NO: 2314
  Synthetic polynucleotide

SEQ ID NO: 2316 - DNA, 164 bp, Artificial Sequence
  Synthetic polynucleotide
atcatctcaccttgcctcctgagagttcttgtgtagaacctgcaggtaaccctagagataaccctagtcgtaaccctaggactaaccctagctataaccctagacttaaccctagtgctaaccctaggtataaccctagggcgcgccatgcttcatcagactct

SEQ ID NO: 2317 - DNA, 164 bp, Artificial Sequence; identical to SEQ ID NO: 2316
  Synthetic polynucleotide

SEQ ID NO: 2318 - DNA, 191 bp, Artificial Sequence
  Synthetic polynucleotide
atcatctcaccttgcctcctggtcggtaagaagctggacctgcaggcgaacagtgctcactatagacgaacagtgctcactattcgcgaacagtgctcactatgaccgaacagtgctcactatctacgaacagtgctcactatactcgaacagtgctcactattgcggcgcgccatgcttcatcagactct

SEQ ID NO: 2319 - DNA, 191 bp, Artificial Sequence; identical to SEQ ID NO: 2318
  Synthetic polynucleotide

SEQ ID NO: 2320 - DNA, 185 bp, Artificial Sequence
  Synthetic polynucleotide
atcatctcaccttgcctcctgagttgaatttgcgtcgccctgcaggcgccactaattagtacagacgccactaattagtactcgcgccactaattagtacgaccgccactaattagtacctacgccactaattagtacactcgccactaattagtactgcggcgcgccatgcttcatcagactct

SEQ ID NO: 2321 - DNA, 185 bp, Artificial Sequence; identical to SEQ ID NO: 2320
  Synthetic polynucleotide

SEQ ID NO: 2322 - DNA, 185 bp, Artificial Sequence
  Synthetic polynucleotide
atcatctcaccttgcctcctgatctatgagttcgtatgcctgcaggcatttagcagcaattaagacatttagcagcaattatcgcatttagcagcaattagaccatttagcagcaattactacatttagcagcaattaactcatttagcagcaattatgcggcgcgccatgcttcatcagactct

SEQ ID NO: 2323 - DNA, 185 bp, Artificial Sequence; identical to SEQ ID NO: 2322
  Synthetic polynucleotide

SEQ ID NO: 2324 - DNA, 197 bp, Artificial Sequence
  Synthetic polynucleotide
atcatctcaccttgcctcctggtagccaacagagctggcctgcaggccactagatggcactagaccactagatggcacttcgccactagatggcactgacccactagatggcactctaccactagatggcactactccactagatggcacttgcccactagatggcactgtaggcgcgccatgcttcatcagactct

SEQ ID NO: 2325 - DNA, 197 bp, Artificial Sequence; identical to SEQ ID NO: 2324
  Synthetic polynucleotide

SEQ ID NO: 2326 - DNA, 190 bp, Artificial Sequence
  Synthetic polynucleotide
atcatctcaccttgcctcctgtctgggaagcatagagtcctgcaggggggtggtttggggagaggggtggtttggggtcgggggtggtttgggggacggggtggtttggggctaggggtggtttggggactggggtggtttggggtgcggggtggtttgggggtaggcgcgccatgcttcatcagactct

SEQ ID NO: 2327 - DNA, 190 bp, Artificial Sequence; identical to SEQ ID NO: 2326
  Synthetic polynucleotide

SEQ ID NO: 2328 - DNA, 172 bp, Artificial Sequence
  Synthetic polynucleotide
atcatctcaccttgcctcctggcccttcgttcaacattcctgcaggcctcctccccagacctcctcccctcgcctcctccccgaccctcctccccctacctcctccccactcctcctcccctgccctcctccccgtacctcctccccggcgcgccatgcttcatcagactct

SEQ ID NO: 2329 - DNA, 172 bp, Artificial Sequence; identical to SEQ ID NO: 2328
  Synthetic polynucleotide

SEQ ID NO: 2330 - DNA, 197 bp, Artificial Sequence
  Synthetic polynucleotide
atcatctcaccttgcctcctgttgatgactcatcgttacctgcaggccccgggcttgcgtgagaagaccccgggcttgcgtgagatcgccccgggcttgcgtgagagacccccgggcttgcgtgagactaccccgggcttgcgtgagaactccccgggcttgcgtgagatgcggcgcgccatgcttcatcagactct

SEQ ID NO: 2331 - DNA, 197 bp, Artificial Sequence; identical to SEQ ID NO: 2330
  Synthetic polynucleotide

SEQ ID NO: 2332 - DNA, 172 bp, Artificial Sequence
  Synthetic polynucleotide
atcatctcaccttgcctcctgttctttggagctacgggcctgcaggatgtgcacatagaatgtgcacattcgatgtgcacatgacatgtgcacatctaatgtgcacatactatgtgcacattgcatgtgcacatgtaatgtgcacatggcgcgccatgcttcatcagactct

SEQ ID NO: 2333 - DNA, 172 bp, Artificial Sequence; identical to SEQ ID NO: 2332
  Synthetic polynucleotide

SEQ ID NO: 2334 - DNA, 164 bp, Artificial Sequence
  Synthetic polynucleotide
atcatctcaccttgcctcctgagagacatgaatgcgaacctgcaggccaattaggagaccaattaggtcgccaattagggacccaattaggctaccaattaggactccaattaggtgcccaattagggtaccaattaggggcgcgccatgcttcatcagactct

SEQ ID NO: 2335 - DNA, 164 bp, Artificial Sequence; identical to SEQ ID NO: 2334
  Synthetic polynucleotide

SEQ ID NO: 2336 - DNA, 185 bp, Artificial Sequence
  Synthetic polynucleotide
atcatctcaccttgcctcctgctatcacggccgtactacctgcaggccgatgacgtcatcccagaccgatgacgtcatccctcgccgatgacgtcatcccgacccgatgacgtcatcccctaccgatgacgtcatcccactccgatgacgtcatccctgcggcgcgccatgcttcatcagactct

SEQ ID NO: 2337 - DNA, 185 bp, Artificial Sequence; identical to SEQ ID NO: 2336
  Synthetic polynucleotide

SEQ ID NO: 2338 - DNA, 164 bp, Artificial Sequence
  Synthetic polynucleotide
atcatctcaccttgcctcctgataatgggactcttgcgcctgcaggtaattaaaaagataattaaaatcgtaattaaaagactaattaaaactataattaaaaacttaattaaaatgctaattaaaagtataattaaaaggcgcgccatgcttcatcagactct

SEQ ID NO: 2339 - DNA, 164 bp, Artificial Sequence; identical to SEQ ID NO: 2338
  Synthetic polynucleotide

SEQ ID NO: 2340 - DNA, 197 bp, Artificial Sequence
  Synthetic polynucleotide
atcatctcaccttgcctcctgtcctatacgaattggtccctgcaggttctatttttagcatagattctatttttagcattcgttctatttttagcatgacttctatttttagcatctattctatttttagcatactttctatttttagcattgcttctatttttagcatgtaggcgcgccatgcttcatcagactct

SEQ ID NO: 2341 - DNA, 197 bp, Artificial Sequence; identical to SEQ ID NO: 2340
  Synthetic polynucleotide

SEQ ID NO: 2342 - DNA, 197 bp, Artificial Sequence
  Synthetic polynucleotide
atcatctcaccttgcctcctgacgttgatccataaccgcctgcaggcggtgactcatccttagacggtgactcatcctttcgcggtgactcatccttgaccggtgactcatccttctacggtgactcatccttactcggtgactcatcctttgccggtgactcatccttgtaggcgcgccatgcttcatcagactct

SEQ ID NO: 2343 - DNA, 197 bp, Artificial Sequence; identical to SEQ ID NO: 2342
  Synthetic polynucleotide

SEQ ID NO: 2344 - DNA, 148 bp, Artificial Sequence
  Synthetic polynucleotide
atcatctcaccttgcctcctgcaccatcacttatgtcacctgcaggcaattacagacaattactcgcaattacgaccaattacctacaattacactcaattactgccaattacgtacaattacggcgcgccatgcttcatcagactct

SEQ ID NO: 2345 - DNA, 148 bp, Artificial Sequence; identical to SEQ ID NO: 2344
  Synthetic polynucleotide

SEQ ID NO: 2346 - DNA, 164 bp, Artificial Sequence
  Synthetic polynucleotide
atcatctcaccttgcctcctgagagaagatgaagttcacctgcaggccaattagcagaccaattagctcgccaattagcgacccaattagcctaccaattagcactccaattagctgcccaattagcgtaccaattagcggcgcgccatgcttcatcagactct

SEQ ID NO: 2347 - DNA, 164 bp, Artificial Sequence; identical to SEQ ID NO: 2346
  Synthetic polynucleotide

SEQ ID NO: 2348 - DNA, 148 bp, Artificial Sequence
  Synthetic polynucleotide
atcatctcaccttgcctcctgacaaagtattacgctcgcctgcaggcaattaaagacaattaatcgcaattaagaccaattaactacaattaaactcaattaatgccaattaagtacaattaaggcgcgccatgcttcatcagactct

SEQ ID NO: 2349 - DNA, 148 bp, Artificial Sequence; identical to SEQ ID NO: 2348
  Synthetic polynucleotide

SEQ ID NO: 2350 - DNA, 172 bp, Artificial Sequence
  Synthetic polynucleotide
atcatctcaccttgcctcctgggtttatgtgtcctcgccctgcaggaccatatgttagaaccatatgtttcgaccatatgttgacaccatatgttctaaccatatgttactaccatatgtttgcaccatatgttgtaaccatatgttggcgcgccatgcttcatcagactct

SEQ ID NO: 2351 - DNA, 172 bp, Artificial Sequence; identical to SEQ ID NO: 2350
  Synthetic polynucleotide

SEQ ID NO: 2352 - DNA, 188 bp, Artificial Sequence
  Synthetic polynucleotide
atcatctcaccttgcctcctgcactctggctgattgaccctgcagggtctttctagaaagagtctttctagaatcggtctttctagaagacgtctttctagaactagtctttctagaaactgtctttctagaatgcgtctttctagaagtagtctttctagaaggcgcgccatgcttcatcagactct

SEQ ID NO: 2353 - DNA, 188 bp, Artificial Sequence; identical to SEQ ID NO: 2352
  Synthetic polynucleotide

SEQ ID NO: 2354 - DNA, 188 bp, Artificial Sequence
  Synthetic polynucleotide
atcatctcaccttgcctcctgatacgcgtccacacctccctgcaggaatattcaacagagaaatattcaacagtcgaatattcaacaggacaatattcaacagctaaatattcaacagactaatattcaacagtgcaatattcaacaggtaaatattcaacagggcgcgccatgcttcatcagactct

SEQ ID NO: 2355 - DNA, 188 bp, Artificial Sequence; identical to SEQ ID NO: 2354
  Synthetic polynucleotide

SEQ ID NO: 2356 - DNA, 197 bp, Artificial Sequence
  Synthetic polynucleotide
atcatctcaccttgcctcctgtgagtcaacattgggcccctgcagggtgacctttgcccccagagtgacctttgccccctcggtgacctttgcccccgacgtgacctttgcccccctagtgacctttgcccccactgtgacctttgccccctgcgtgacctttgcccccgtaggcgcgccatgcttcatcagactct

SEQ ID NO: 2357 - DNA, 197 bp, Artificial Sequence; identical to SEQ ID NO: 2356
  Synthetic polynucleotide

SEQ ID NO: 2358 - DNA, 197 bp, Artificial Sequence
  Synthetic polynucleotide
atcatctcaccttgcctcctgtcacctaatcgcgagatcctgcaggcccacttcctgtctcagacccacttcctgtctctcgcccacttcctgtctcgaccccacttcctgtctcctacccacttcctgtctcactcccacttcctgtctctgccccacttcctgtctcgtaggcgcgccatgcttcatcagactct

SEQ ID NO: 2359 - DNA, 197 bp, Artificial Sequence; identical to SEQ ID NO: 2358
  Synthetic polynucleotide

SEQ ID NO: 2360 - DNA, 185 bp, Artificial Sequence
  Synthetic polynucleotide
atcatctcaccttgcctcctggcactgattcggacctccctgcaggcgctgtccatggtgctagacgctgtccatggtgcttcgcgctgtccatggtgctgaccgctgtccatggtgctctacgctgtccatggtgctactcgctgtccatggtgcttgcggcgcgccatgcttcatcagactct

SEQ ID NO: 2361 - DNA, 185 bp, Artificial Sequence; identical to SEQ ID NO: 2360
  Synthetic polynucleotide

SEQ ID NO: 2362 - DNA, 191 bp, Artificial Sequence
  Synthetic polynucleotide
atcatctcaccttgcctcctgtccgttgtgtaagcactcctgcaggagcgctaattagcgattagaagcgctaattagcgatttcgagcgctaattagcgattgacagcgctaattagcgattctaagcgctaattagcgattactagcgctaattagcgatttgcggcgcgccatgcttcatcagactct

SEQ ID NO: 2363 - DNA, 191 bp, Artificial Sequence; identical to SEQ ID NO: 2362
  Synthetic polynucleotide

SEQ ID NO: 2364 - DNA, 185 bp, Artificial Sequence
  Synthetic polynucleotide
atcatctcaccttgcctcctggtaccctgactgtgaggcctgcaggaagaacatcctgttccagaaagaacatcctgttcctcgaagaacatcctgttccgacaagaacatcctgttccctaaagaacatcctgttccactaagaacatcctgttcctgcggcgcgccatgcttcatcagactct

SEQ ID NO: 2365 - DNA, 185 bp, Artificial Sequence; identical to SEQ ID NO: 2364
  Synthetic polynucleotide

SEQ ID NO: 2366 - DNA, 148 bp, Artificial Sequence
  Synthetic polynucleotide
atcatctcaccttgcctcctggccagtctgctttggaacctgcaggcaattagagacaattagtcgcaattaggaccaattagctacaattagactcaattagtgccaattaggtacaattagggcgcgccatgcttcatcagactct

SEQ ID NO: 2367 - DNA, 148 bp, Artificial Sequence; identical to SEQ ID NO: 2366
  Synthetic polynucleotide

SEQ ID NO: 2368 - DNA, 190 bp, Artificial Sequence
  Synthetic polynucleotide
atcatctcaccttgcctcctgcaagcatggctttcccgcctgcaggcacattcctgcgccagacacattcctgcgcctcgcacattcctgcgccgaccacattcctgcgccctacacattcctgcgccactcacattcctgcgcctgccacattcctgcgccgtaggcgcgccatgcttcatcagactct

SEQ ID NO: 2369 - DNA, 190 bp, Artificial Sequence; identical to SEQ ID NO: 2368
  Synthetic polynucleotide

SEQ ID NO: 2370 - DNA, 156 bp, Artificial Sequence
  Synthetic polynucleotide
atcatctcaccttgcctcctgaaagtacctatcagccacctgcaggtgaaacttagatgaaactttcgtgaaacttgactgaaacttctatgaaacttacttgaaactttgctgaaacttgtatgaaacttggcgcgccatgcttcatcagactct

SEQ ID NO: 2371 - DNA, 156 bp, Artificial Sequence; identical to SEQ ID NO: 2370
  Synthetic polynucleotide

SEQ ID NO: 2372 - DNA, 164 bp, Artificial Sequence
  Synthetic polynucleotide
atcatctcaccttgcctcctgccctaatagttagcggacctgcaggactcaccacagaactcaccactcgactcaccacgacactcaccacctaactcaccacactactcaccactgcactcaccacgtaactcaccacggcgcgccatgcttcatcagactct

SEQ ID NO: 2373 - DNA, 164 bp, Artificial Sequence; identical to SEQ ID NO: 2372
  Synthetic polynucleotide

SEQ ID NO: 2374 - DNA, 164 bp, Artificial Sequence
  Synthetic polynucleotide
atcatctcaccttgcctcctggtgatctccgggtgtatcctgcaggtttgtttacagatttgtttactcgtttgtttacgactttgtttacctatttgtttacacttttgtttactgctttgtttacgtatttgtttacggcgcgccatgcttcatcagactct

SEQ ID NO: 2375 - DNA, 164 bp, Artificial Sequence; identical to SEQ ID NO: 2374
  Synthetic polynucleotide

SEQ ID NO: 2376 - DNA, 164 bp, Artificial Sequence
  Synthetic polynucleotide
atcatctcaccttgcctcctgagcgggctaaggtgatgcctgcaggacttccggtagaacttccggttcgacttccggtgacacttccggtctaacttccggtactacttccggttgcacttccggtgtaacttccggtggcgcgccatgcttcatcagactct

SEQ ID NO: 2377 - DNA, 164 bp, Artificial Sequence; identical to SEQ ID NO: 2376
  Synthetic polynucleotide

SEQ ID NO: 2378 - DNA, 196 bp, Artificial Sequence
  Synthetic polynucleotide
atcatctcaccttgcctcctggtctacctcactaagagcctgcaggataattaaattaaagaataattaaattaatcgataattaaattaagacataattaaattaactaataattaaattaaactataattaaattaatgcataattaaattaagtaataattaaattaaggcgcgccatgcttcatcagactct

SEQ ID NO: 2379 - DNA, 196 bp, Artificial Sequence; identical to SEQ ID NO: 2378
  Synthetic polynucleotide

SEQ ID NO: 2380 - DNA, 180 bp, Artificial Sequence
  Synthetic polynucleotide
atcatctcaccttgcctcctggttgtagctgcgtctggcctgcaggaccgtgacctgagaaccgtgacctgtcgaccgtgacctggacaccgtgacctgctaaccgtgacctgactaccgtgacctgtgcaccgtgacctggtaaccgtgacctgggcgcgccatgcttcatcagactct

SEQ ID NO: 2381 - DNA, 180 bp, Artificial Sequence; identical to SEQ ID NO: 2380
  Synthetic polynucleotide

SEQ ID NO: 2382 - DNA, 188 bp, Artificial Sequence
  Synthetic polynucleotide
atcatctcaccttgcctcctggtacgatgggcagtaagcctgcagggaaaatgaaactagagaaaatgaaacttcggaaaatgaaactgacgaaaatgaaactctagaaaatgaaactactgaaaatgaaacttgcgaaaatgaaactgtagaaaatgaaactggcgcgccatgcttcatcagactct

SEQ ID NO: 2383 - DNA, 188 bp, Artificial Sequence; identical to SEQ ID NO: 2382
  Synthetic polynucleotide

SEQ ID NO: 2384 - DNA, 196 bp, Artificial Sequence
  Synthetic polynucleotide
atcatctcaccttgcctcctgcacgagataaggatcttcctgcaggaatttatgtaataagaaatttatgtaatatcgaatttatgtaatagacaatttatgtaatactaaatttatgtaataactaatttatgtaatatgcaatttatgtaatagtaaatttatgtaataggcgcgccatgcttcatcagactct

SEQ ID NO: 2385 - DNA, 196 bp, Artificial Sequence; identical to SEQ ID NO: 2384
  Synthetic polynucleotide

SEQ ID NO: 2386 - DNA, 172 bp, Artificial Sequence
  Synthetic polynucleotide
atcatctcaccttgcctcctgcgtacacggatgcgcaacctgcagggcgcgtgcgcagagcgcgtgcgctcggcgcgtgcgcgacgcgcgtgcgcctagcgcgtgcgcactgcgcgtgcgctgcgcgcgtgcgcgtagcgcgtgcgcggcgcgccatgcttcatcagactct

SEQ ID NO: 2387 - DNA, 172 bp, Artificial Sequence; identical to SEQ ID NO: 2386
  Synthetic polynucleotide

SEQ ID NO: 2388 - DNA, 197 bp, Artificial Sequence
  Synthetic polynucleotide
atcatctcaccttgcctcctggactagccaccaggtagcctgcagggccgccatcttgggtagagccgccatcttgggttcggccgccatcttgggtgacgccgccatcttgggtctagccgccatcttgggtactgccgccatcttgggttgcgccgccatcttgggtgtaggcgcgccatgcttcatcagactct

SEQ ID NO: 2389 - DNA, 197 bp, Artificial Sequence; identical to SEQ ID NO: 2388
  Synthetic polynucleotide

SEQ ID NO: 2390 - DNA, 191 bp, Artificial Sequence
  Synthetic polynucleotide
atcatctcaccttgcctcctgtcaatctgacgggtagacctgcaggcatcaataacattgatcagacatcaataacattgatctcgcatcaataacattgatcgaccatcaataacattgatcctacatcaataacattgatcactcatcaataacattgatctgcggcgcgccatgcttcatcagactct

SEQ ID NO: 2391 - DNA, 191 bp, Artificial Sequence; identical to SEQ ID NO: 2390
  Synthetic polynucleotide

SEQ ID NO: 2392 - DNA, 197 bp, Artificial Sequence
  Synthetic polynucleotide
atcatctcaccttgcctcctgcgcaccttaatccgatacctgcaggtacgcgcgaaaactgagatacgcgcgaaaactgtcgtacgcgcgaaaactggactacgcgcgaaaactgctatacgcgcgaaaactgacttacgcgcgaaaactgtgctacgcgcgaaaactggtaggcgcgccatgcttcatcagactct

SEQ ID NO: 2393 - DNA, 197 bp, Artificial Sequence; identical to SEQ ID NO: 2392
  Synthetic polynucleotide

SEQ ID NO: 2394 - DNA, 191 bp, Artificial Sequence
  Synthetic polynucleotide
atcatctcaccttgcctcctgagatatacagctgacgacctgcaggcatttaagtacttagtaagacatttaagtacttagtatcgcatttaagtacttagtagaccatttaagtacttagtactacatttaagtacttagtaactcatttaagtacttagtatgcggcgcgccatgcttcatcagactct

SEQ ID NO: 2395 - DNA, 191 bp, Artificial Sequence; identical to SEQ ID NO: 2394
  Synthetic polynucleotide

SEQ ID NO: 2396 - DNA, 132 bp, Artificial Sequence
  Synthetic polynucleotide
atcatctcaccttgcctcctgttgtgtataacgctgggcctgcaggtgtttagatgttttcgtgtttgactgtttctatgtttacttgttttgctgtttgtatgtttggcgcgccatgcttcatcagactct

SEQ ID NO: 2397 - DNA, 132 bp, Artificial Sequence; identical to SEQ ID NO: 2396
  Synthetic polynucleotide

SEQ ID NO: 2398 - DNA, 172 bp, Artificial Sequence
  Synthetic polynucleotide
atcatctcaccttgcctcctgctgacgtagaagattaccctgcaggcaaaggtcagagacaaaggtcagtcgcaaaggtcaggaccaaaggtcagctacaaaggtcagactcaaaggtcagtgccaaaggtcaggtacaaaggtcagggcgcgccatgcttcatcagactct

SEQ ID NO: 2399 - DNA, 172 bp, Artificial Sequence; identical to SEQ ID NO: 2398
  Synthetic polynucleotide

SEQ ID NO: 2400 - DNA, 197 bp, Artificial Sequence
  Synthetic polynucleotide
atcatctcaccttgcctcctgtcgttactctaacgaaacctgcaggtggccccagggcatgagatggccccagggcatgtcgtggccccagggcatggactggccccagggcatgctatggccccagggcatgacttggccccagggcatgtgctggccccagggcatggtaggcgcgccatgcttcatcagactct

SEQ ID NO: 2401 - DNA, 197 bp, Artificial Sequence; identical to SEQ ID NO: 2400
  Synthetic polynucleotide

SEQ ID NO: 2402 - DNA, 185 bp, Artificial Sequence
  Synthetic polynucleotide
atcatctcaccttgcctcctgtactatctggagacgtgcctgcagggagttcattgagttcaagagagttcattgagttcatcggagttcattgagttcagacgagttcattgagttcactagagttcattgagttcaactgagttcattgagttcatgcggcgcgccatgcttcatcagactct

SEQ ID NO: 2403 - DNA, 185 bp, Artificial Sequence; identical to SEQ ID NO: 2402
  Synthetic polynucleotide

SEQ ID NO: 2404 - DNA, 188 bp, Artificial Sequence
  Synthetic polynucleotide
atcatctcaccttgcctcctgtatctcaaacgtaacgtcctgcaggtttgattgatgtagatttgattgatgttcgtttgattgatgtgactttgattgatgtctatttgattgatgtacttttgattgatgttgctttgattgatgtgtatttgattgatgtggcgcgccatgcttcatcagactct

SEQ ID NO: 2405 - DNA, 188 bp, Artificial Sequence; identical to SEQ ID NO: 2404
  Synthetic polynucleotide

SEQ ID NO: 2406 - DNA, 197 bp, Artificial Sequence
  Synthetic polynucleotide
atcatctcaccttgcctcctgtcacgttgatatgacgacctgcaggaccggaagtacatccggtagaaccggaagtacatccggttcgaccggaagtacatccggtgacaccggaagtacatccggtctaaccggaagtacatccggtactaccggaagtacatccggttgcggcgcgccatgcttcatcagactct

SEQ ID NO: 2407 - DNA, 197 bp, Artificial Sequence; identical to SEQ ID NO: 2406
  Synthetic polynucleotide

SEQ ID NO: 2408 - DNA, 185 bp, Artificial Sequence
  Synthetic polynucleotide
atcatctcaccttgcctcctgatatcgacggctaaaggcctgcaggaactagctgtcaatacagaaactagctgtcaatactcgaactagctgtcaatacgacaactagctgtcaatacctaaactagctgtcaatacactaactagctgtcaatactgcggcgcgccatgcttcatcagactct

SEQ ID NO: 2409 - DNA, 185 bp, Artificial Sequence; identical to SEQ ID NO: 2408
  Synthetic polynucleotide

SEQ ID NO: 2410 - DNA, 190 bp, Artificial Sequence
  Synthetic polynucleotide
atcatctcaccttgcctcctgaagcggaattcgagaaccctgcaggaaccacaacacataagaaaccacaacacatatcgaaccacaacacatagacaaccacaacacatactaaaccacaacacataactaaccacaacacatatgcaaccacaacacatagtaggcgcgccatgcttcatcagactct

SEQ ID NO: 2411 - DNA, 190 bp, Artificial Sequence; identical to SEQ ID NO: 2410
  Synthetic polynucleotide

SEQ ID NO: 2412 - DNA, 180 bp, Artificial Sequence
  Synthetic polynucleotide
atcatctcaccttgcctcctgggactctagtgatttcgcctgcaggattttatggccagaattttatggcctcgattttatggccgacattttatggccctaattttatggccactattttatggcctgcattttatggccgtaattttatggccggcgcgccatgcttcatcagactct

SEQ ID NO: 2413 - DNA, 180 bp, Artificial Sequence; identical to SEQ ID NO: 2412
  Synthetic polynucleotide

SEQ ID NO: 2414 - DNA, 140 bp, Artificial Sequence
  Synthetic polynucleotide
atcatctcaccttgcctcctgctctaggacgcgaagagcctgcaggagatagagaagatagtcgagataggacagatagctaagatagactagatagtgcagataggtaagatagggcgcgccatgcttcatcagactct

SEQ ID NO: 2415 - DNA, 140 bp, Artificial Sequence; identical to SEQ ID NO: 2414
  Synthetic polynucleotide

SEQ ID NO: 2416 - DNA, 148 bp, Artificial Sequence
  Synthetic polynucleotide
atcatctcaccttgcctcctgcccagtgtgtgtttcgccctgcaggctgttctagactgttcttcgctgttctgacctgttctctactgttctactctgttcttgcctgttctgtactgttctggcgcgccatgcttcatcagactct

SEQ ID NO: 2417 - DNA, 148 bp, Artificial Sequence; identical to SEQ ID NO: 2416
  Synthetic polynucleotide

SEQ ID NO: 2418 - DNA, 156 bp, Artificial Sequence
  Synthetic polynucleotide
atcatctcaccttgcctcctgggacgctgctagctatacctgcaggttgacaggagattgacaggtcgttgacagggacttgacaggctattgacaggactttgacaggtgcttgacagggtattgacaggggcgcgccatgcttcatcagactct

SEQ ID NO: 2419 - DNA, 156 bp, Artificial Sequence; identical to SEQ ID NO: 2418
  Synthetic polynucleotide

SEQ ID NO: 2420 - DNA, 180 bp, Artificial Sequence
  Synthetic polynucleotide
atcatctcaccttgcctcctgagcatctttccggcttgcctgcagggaatttataccagagaatttatacctcggaatttataccgacgaatttataccctagaatttataccactgaatttatacctgcgaatttataccgtagaatttataccggcgcgccatgcttcatcagactct

SEQ ID NO: 2421 - DNA, 180 bp, Artificial Sequence; identical to SEQ ID NO: 2420
  Synthetic polynucleotide

SEQ ID NO: 2422 - DNA, 196 bp, Artificial Sequence
  Synthetic polynucleotide
atcatctcaccttgcctcctgcaacagacgagcttcaccctgcaggttaattaaattaaagattaattaaattaatcgttaattaaattaagacttaattaaattaactattaattaaattaaactttaattaaattaatgcttaattaaattaagtattaattaaattaaggcgcgccatgcttcatcagactct

SEQ ID NO: 2423 - DNA, 196 bp, Artificial Sequence; identical to SEQ ID NO: 2422
  Synthetic polynucleotide

SEQ ID NO: 2424 - DNA, 180 bp, Artificial Sequence
  Synthetic polynucleotide
atcatctcaccttgcctcctgatagacagtagtacgtacctgcaggtatcgatagttagatatcgatagtttcgtatcgatagttgactatcgatagttctatatcgatagttacttatcgatagtttgctatcgatagttgtatatcgatagttggcgcgccatgcttcatcagactct

SEQ ID NO: 2425 - DNA, 180 bp, Artificial Sequence; identical to SEQ ID NO: 2424
  Synthetic polynucleotide

SEQ ID NO: 2426 - DNA, 188 bp, Artificial Sequence
  Synthetic polynucleotide
atcatctcaccttgcctcctgaaagccatgtgcgttcgcctgcaggttcctaattgggagattcctaattgggtcgttcctaattggggacttcctaattgggctattcctaattgggactttcctaattgggtgcttcctaattggggtattcctaattgggggcgcgccatgcttcatcagactct

SEQ ID NO: 2427 - DNA, 188 bp, Artificial Sequence; identical to SEQ ID NO: 2426
  Synthetic polynucleotide

SEQ ID NO: 2428 - DNA, 188 bp, Artificial Sequence
  Synthetic polynucleotide
atcatctcaccttgcctcctgttctgatcccgaccaaacctgcaggtttgattgatggagatttgattgatggtcgtttgattgatgggactttgattgatggctatttgattgatggacttttgattgatggtgctttgattgatgggtatttgattgatggggcgcgccatgcttcatcagactct

SEQ ID NO: 2429 - DNA, 188 bp, Artificial Sequence; identical to SEQ ID NO: 2428
  Synthetic polynucleotide

SEQ ID NO: 2430 - DNA, 186 bp, Artificial Sequence
  Synthetic polynucleotide
atcatctcaccttgcctcctgcccggttgtgttgcgatcctgcagggtgcgggggcggggggggggagagtgcgggggcggggggggggtcggtgcgggggcgggggggggggacgtgcgggggcggggggggggctagtgcgggggcggggggggggactggcgcgccatgcttcatcagactct

SEQ ID NO: 2431 - DNA, 186 bp, Artificial Sequence; identical to SEQ ID NO: 2430
  Synthetic polynucleotide

SEQ ID NO: 2432 - DNA, 190 bp, Artificial Sequence
  Synthetic polynucleotide
atcatctcaccttgcctcctgctgtaagggtctgtcatcctgcaggggcccaaggtcacaagaggcccaaggtcacatcgggcccaaggtcacagacggcccaaggtcacactaggcccaaggtcacaactggcccaaggtcacatgcggcccaaggtcacagtaggcgcgccatgcttcatcagactct

SEQ ID NO: 2433 - DNA, 190 bp, Artificial Sequence; identical to SEQ ID NO: 2432
  Synthetic polynucleotide

SEQ ID NO: 2434 - DNA, 191 bp, Artificial Sequence
  Synthetic polynucleotide
atcatctcaccttgcctcctgcgctgctatctgtcccacctgcaggaaatttgctgacttagcagaaaatttgctgacttagctcgaaatttgctgacttagcgacaaatttgctgacttagcctaaaatttgctgacttagcactaaatttgctgacttagctgcggcgcgccatgcttcatcagactct

SEQ ID NO: 2435 - DNA, 191 bp, Artificial Sequence; identical to SEQ ID NO: 2434
  Synthetic polynucleotide

SEQ ID NO: 2436 - DNA, 197 bp, Artificial Sequence
  Synthetic polynucleotide
atcatctcaccttgcctcctgccctgacgtccaaacttcctgcaggggcgccccctggcggagaggcgccccctggcggtcgggcgccccctggcgggacggcgccccctggcggctaggcgccccctggcggactggcgccccctggcggtgcggcgccccctggcgggtaggcgcgccatgcttcatcagactct

SEQ ID NO: 2437 - DNA, 197 bp, Artificial Sequence; identical to SEQ ID NO: 2436
  Synthetic polynucleotide

SEQ ID NO: 2438 - DNA, 197 bp, Artificial Sequence
  Synthetic polynucleotide
atcatctcaccttgcctcctgaactaatccggtcgtggcctgcaggcccgccacgtgacccagacccgccacgtgaccctcgcccgccacgtgacccgaccccgccacgtgacccctacccgccacgtgacccactcccgccacgtgaccctgccccgccacgtgacccgtaggcgcgccatgcttcatcagactct

SEQ ID NO: 2439 - DNA, 197 bp, Artificial Sequence; identical to SEQ ID NO: 2438
  Synthetic polynucleotide

SEQ ID NO: 2440 - DNA, 196 bp, Artificial Sequence
  Synthetic polynucleotide
atcatctcaccttgcctcctgggactggatccatacgtcctgcaggttaattaaattagagattaattaaattagtcgttaattaaattaggacttaattaaattagctattaattaaattagactttaattaaattagtgcttaattaaattaggtattaattaaattagggcgcgccatgcttcatcagactct

SEQ ID NO: 2441 - DNA, 196 bp, Artificial Sequence; identical to SEQ ID NO: 2440
  Synthetic polynucleotide

SEQ ID NO: 2442 - DNA, 156 bp, Artificial Sequence
  Synthetic polynucleotide
atcatctcaccttgcctcctgcatgagactatccaaagcctgcaggtgtcataaagatgtcataatcgtgtcataagactgtcataactatgtcataaacttgtcataatgctgtcataagtatgtcataaggcgcgccatgcttcatcagactct

SEQ ID NO: 2443 - DNA, 156 bp, Artificial Sequence; identical to SEQ ID NO: 2442
  Synthetic polynucleotide

SEQ ID NO: 2444 - DNA, 164 bp, Artificial Sequence
  Synthetic polynucleotide
atcatctcaccttgcctcctgaaattcccaactactggcctgcagggaccaattaagagaccaattatcggaccaattagacgaccaattactagaccaattaactgaccaattatgcgaccaattagtagaccaattaggcgcgccatgcttcatcagactct

SEQ ID NO: 2445 - DNA, 164 bp, Artificial Sequence; identical to SEQ ID NO: 2444
  Synthetic polynucleotide

SEQ ID NO: 2446 - DNA, 197 bp, Artificial Sequence
  Synthetic polynucleotide
atcatctcaccttgcctcctgccttagatacacagatgcctgcaggaacactaccattgttagaaacactaccattgtttcgaacactaccattgttgacaacactaccattgttctaaacactaccattgttactaacactaccattgtttgcaacactaccattgttgtaggcgcgccatgcttcatcagactct

SEQ ID NO: 2447 - DNA, 197 bp, Artificial Sequence; identical to SEQ ID NO: 2446
  Synthetic polynucleotide

SEQ ID NO: 2448 - DNA, 191 bp, Artificial Sequence
  Synthetic polynucleotide
atcatctcaccttgcctcctgttccatgcgaccacaagcctgcaggcatgactcagcaattttagacatgactcagcaatttttcgcatgactcagcaattttgaccatgactcagcaattttctacatgactcagcaattttactcatgactcagcaatttttgcggcgcgccatgcttcatcagactct

SEQ ID NO: 2449 - DNA, 191 bp, Artificial Sequence; identical to SEQ ID NO: 2448
  Synthetic polynucleotide

SEQ ID NO: 2450 - DNA, 197 bp, Artificial Sequence
  Synthetic polynucleotide
atcatctcaccttgcctcctgtgacgaaacaggactagcctgcaggaccggaagtacatccggcagaaccggaagtacatccggctcgaccggaagtacatccggcgacaccggaagtacatccggcctaaccggaagtacatccggcactaccggaagtacatccggctgcggcgcgccatgcttcatcagactct

SEQ ID NO: 2451 - DNA, 197 bp, Artificial Sequence; identical to SEQ ID NO: 2450
  Synthetic polynucleotide

SEQ ID NO: 2452 - DNA, 197 bp, Artificial Sequence
  Synthetic polynucleotide
atcatctcaccttgcctcctgtgggtcctcattctgaccctgcaggggtttccgggaaatgagaggtttccgggaaatgtcgggtttccgggaaatggacggtttccgggaaatgctaggtttccgggaaatgactggtttccgggaaatgtgcggtttccgggaaatggtaggcgcgccatgcttcatcagactct

SEQ ID NO: 2453 - DNA, 197 bp, Artificial Sequence; identical to SEQ ID NO: 2452
  Synthetic polynucleotide

SEQ ID NO: 2454 - DNA, 172 bp, Artificial Sequence
  Synthetic polynucleotide
atcatctcaccttgcctcctgcttagcgctatatcgagcctgcaggatcagctgttagaatcagctgtttcgatcagctgttgacatcagctgttctaatcagctgttactatcagctgtttgcatcagctgttgtaatcagctgttggcgcgccatgcttcatcagactct

SEQ ID NO: 2455 - DNA, 172 bp, Artificial Sequence; identical to SEQ ID NO: 2454
  Synthetic polynucleotide

SEQ ID NO: 2456 - DNA, 156 bp, Artificial Sequence
  Synthetic polynucleotide
atcatctcaccttgcctcctgtctagttggcgcatttacctgcaggttgacagcagattgacagctcgttgacagcgacttgacagcctattgacagcactttgacagctgcttgacagcgtattgacagcggcgcgccatgcttcatcagactct

SEQ ID NO: 2457 - DNA, 156 bp, Artificial Sequence; identical to SEQ ID NO: 2456
  Synthetic polynucleotide

SEQ ID NO: 2458 - DNA, 180 bp, Artificial Sequence
  Synthetic polynucleotide
atcatctcaccttgcctcctgggcacagtatggctctgcctgcagggaaagtgaaagagagaaagtgaaagtcggaaagtgaaaggacgaaagtgaaagctagaaagtgaaagactgaaagtgaaagtgcgaaagtgaaaggtagaaagtgaaagggcgcgccatgcttcatcagactct

SEQ ID NO: 2459 - DNA, 180 bp, Artificial Sequence; identical to SEQ ID NO: 2458
  Synthetic polynucleotide

SEQ ID NO: 2460 - DNA, 156 bp, Artificial Sequence
  Synthetic polynucleotide
atcatctcaccttgcctcctgcactcctcaattcttcgcctgcagggctgacgcagagctgacgctcggctgacgcgacgctgacgcctagctgacgcactgctgacgctgcgctgacgcgtagctgacgcggcgcgccatgcttcatcagactct

SEQ ID NO: 2461 - DNA, 156 bp, Artificial Sequence; identical to SEQ ID NO: 2460
  Synthetic polynucleotide

SEQ ID NO: 2462 - DNA, 185 bp, Artificial Sequence
  Synthetic polynucleotide
atcatctcaccttgcctcctggcacttatccgtcgacgcctgcaggtgaccatatatggtcaagatgaccatatatggtcatcgtgaccatatatggtcagactgaccatatatggtcactatgaccatatatggtcaacttgaccatatatggtcatgcggcgcgccatgcttcatcagactct

SEQ ID NO: 2463 - DNA, 185 bp, Artificial Sequence; identical to SEQ ID NO: 2462
  Synthetic polynucleotide

SEQ ID NO: 2464 - DNA, 172 bp, Artificial Sequence
  Synthetic polynucleotide
atcatctcaccttgcctcctggttggcggctaactcatcctgcaggcaaaggtcaaagacaaaggtcaatcgcaaaggtcaagaccaaaggtcaactacaaaggtcaaactcaaaggtcaatgccaaaggtcaagtacaaaggtcaaggcgcgccatgcttcatcagactct

SEQ ID NO: 2465 - DNA, 172 bp, Artificial Sequence; identical to SEQ ID NO: 2464
  Synthetic polynucleotide

SEQ ID NO: 2466 - DNA, 190 bp, Artificial Sequence
  Synthetic polynucleotide
atcatctcaccttgcctcctgagcattgaaccgcgaggcctgcaggccagttcaaaccagagaccagttcaaaccagtcgccagttcaaaccaggacccagttcaaaccagctaccagttcaaaccagactccagttcaaaccagtgcccagttcaaaccaggtaggcgcgccatgcttcatcagactct

SEQ ID NO: 2467 - DNA, 190 bp, Artificial Sequence; identical to SEQ ID NO: 2466
  Synthetic polynucleotide

SEQ ID NO: 2468 - DNA, 180 bp, Artificial Sequence
  Synthetic polynucleotide
atcatctcaccttgcctcctgcgttaatttgtccatcgcctgcaggacccggaagtaagaacccggaagtatcgacccggaagtagacacccggaagtactaacccggaagtaactacccggaagtatgcacccggaagtagtaacccggaagtaggcgcgccatgcttcatcagactct

SEQ ID NO: 2469 - DNA, 180 bp, Artificial Sequence; identical to SEQ ID NO: 2468
  Synthetic polynucleotide

SEQ ID NO: 2470 - DNA, 191 bp, Artificial Sequence
  Synthetic polynucleotide
atcatctcaccttgcctcctgtacgagggacatacctgcctgcaggaggggaggtacacggtgttcttttgggagaaggggaggtacacggtgttcttttgggtcgaggggaggtacacggtgttcttttggggacaggggaggtacacggtgttcttttgggctaggcgcgccatgcttcatcagactct

SEQ ID NO: 2471 - DNA, 191 bp, Artificial Sequence; identical to SEQ ID NO: 2470
  Synthetic polynucleotide

SEQ ID NO: 2472 - DNA, 172 bp, Artificial Sequence
  Synthetic polynucleotide
atcatctcaccttgcctcctgatgctaccttaccagcacctgcaggaaatgactggagaaaatgactggtcgaaatgactgggacaaatgactggctaaaatgactggactaaatgactggtgcaaatgactgggtaaaatgactggggcgcgccatgcttcatcagactct

SEQ ID NO: 2473 - DNA, 172 bp, Artificial Sequence; identical to SEQ ID NO: 2472
  Synthetic polynucleotide

SEQ ID NO: 2474 - DNA, 197 bp, Artificial Sequence
  Synthetic polynucleotide
atcatctcaccttgcctcctgaatataccgggcgcagtcctgcaggatgaatatgcatataagaatgaatatgcatatatcgatgaatatgcatatagacatgaatatgcatatactaatgaatatgcatataactatgaatatgcatatatgcatgaatatgcatatagtaggcgcgccatgcttcatcagactct

SEQ ID NO: 2475 - DNA, 197 bp, Artificial Sequence; identical to SEQ ID NO: 2474
  Synthetic polynucleotide

SEQ ID NO: 2476 - DNA, 190 bp, Artificial Sequence
  Synthetic polynucleotide
atcatctcaccttgcctcctgtacgtgctactagtacccctgcaggtgttatcttatcttagatgttatcttatctttcgtgttatcttatcttgactgttatcttatcttctatgttatcttatcttacttgttatcttatctttgctgttatcttatcttgtaggcgcgccatgcttcatcagactct

SEQ ID NO: 2477 - DNA, 190 bp, Artificial Sequence; identical to SEQ ID NO: 2476
  Synthetic polynucleotide

SEQ ID NO: 2478 - DNA, 197 bp, Artificial Sequence
  Synthetic polynucleotide
atcatctcaccttgcctcctgagtcagctgacaatagccctgcaggagaaagtgaaagtgaagaagaaagtgaaagtgatcgagaaagtgaaagtgagacagaaagtgaaagtgactaagaaagtgaaagtgaactagaaagtgaaagtgatgcagaaagtgaaagtgagtaggcgcgccatgcttcatcagactct

SEQ ID NO: 2479 - DNA, 197 bp, Artificial Sequence; identical to SEQ ID NO: 2478
  Synthetic polynucleotide

SEQ ID NO: 2480 - DNA, 164 bp, Artificial Sequence
  Synthetic polynucleotide
atcatctcaccttgcctcctgtgcaacggaaacagtcacctgcaggtaattaaatagataattaaattcgtaattaaatgactaattaaatctataattaaatacttaattaaattgctaattaaatgtataattaaatggcgcgccatgcttcatcagactct

SEQ ID NO: 2481 - DNA, 164 bp, Artificial Sequence; identical to SEQ ID NO: 2480
  Synthetic polynucleotide

SEQ ID NO: 2482 - DNA, 148 bp, Artificial Sequence
  Synthetic polynucleotide
atcatctcaccttgcctcctgtagtctaatgaacacctcctgcaggctgtcaaagactgtcaatcgctgtcaagacctgtcaactactgtcaaactctgtcaatgcctgtcaagtactgtcaaggcgcgccatgcttcatcagactct

SEQ ID NO: 2483 - DNA, 148 bp, Artificial Sequence; identical to SEQ ID NO: 2482
  Synthetic polynucleotide

SEQ ID NO: 2484 - DNA, 180 bp, Artificial Sequence
  Synthetic polynucleotide
atcatctcaccttgcctcctgtaatcaagcgtctaccccctgcaggacccggaagtgagaacccggaagtgtcgacccggaagtggacacccggaagtgctaacccggaagtgactacccggaagtgtgcacccggaagtggtaacccggaagtgggcgcgccatgcttcatcagactct

SEQ ID NO: 2485 - DNA, 180 bp, Artificial Sequence; identical to SEQ ID NO: 2484
  Synthetic polynucleotide

SEQ ID NO: 2486 - DNA, 148 bp, Artificial Sequence
  Synthetic polynucleotide
atcatctcaccttgcctcctgtacgtggctactagatgcctgcaggctgtcacagactgtcactcgctgtcacgacctgtcacctactgtcacactctgtcactgcctgtcacgtactgtcacggcgcgccatgcttcatcagactct

SEQ ID NO: 2487 - DNA, 148 bp, Artificial Sequence; identical to SEQ ID NO: 2486
  Synthetic polynucleotide

SEQ ID NO: 2488 - DNA, 197 bp, Artificial Sequence
  Synthetic polynucleotide
atcatctcaccttgcctcctgcttcgggttgttatgctcctgcaggtttccattatggaaaagatttccattatggaaatcgtttccattatggaaagactttccattatggaaactatttccattatggaaaacttttccattatggaaatgctttccattatggaaagtaggcgcgccatgcttcatcagactct

SEQ ID NO: 2489 - DNA, 197 bp, Artificial Sequence; identical to SEQ ID NO: 2488
  Synthetic polynucleotide

SEQ ID NO: 2490 - DNA, 172 bp, Artificial Sequence
  Synthetic polynucleotide
atcatctcaccttgcctcctgaaccaccgaaggttgaacctgcagggcgacttccgagagcgacttccgtcggcgacttccggacgcgacttccgctagcgacttccgactgcgacttccgtgcgcgacttccggtagcgacttccgggcgcgccatgcttcatcagactct

SEQ ID NO: 2491 - DNA, 172 bp, Artificial Sequence; identical to SEQ ID NO: 2490
  Synthetic polynucleotide

SEQ ID NO: 2492 - DNA, 180 bp, Artificial Sequence
  Synthetic polynucleotide
atcatctcaccttgcctcctgataatcctctgcgttaacctgcaggcttcccgccccagacttcccgcccctcgcttcccgccccgaccttcccgccccctacttcccgccccactcttcccgcccctgccttcccgccccgtacttcccgccccggcgcgccatgcttcatcagactct

SEQ ID NO: 2493 - DNA, 180 bp, Artificial Sequence; identical to SEQ ID NO: 2492
  Synthetic polynucleotide

SEQ ID NO: 2494 - DNA, 197 bp, Artificial Sequence
  Synthetic polynucleotide
atcatctcaccttgcctcctggattgatgtcatagatgcctgcaggccgcgcgccctccccagaccgcgcgccctcccctcgccgcgcgccctccccgacccgcgcgccctccccctaccgcgcgccctccccactccgcgcgccctcccctgcccgcgcgccctccccgtaggcgcgccatgcttcatcagactct

SEQ ID NO: 2495 - DNA, 197 bp, Artificial Sequence; identical to SEQ ID NO: 2494
  Synthetic polynucleotide

SEQ ID NO: 2496 - DNA, 185 bp, Artificial Sequence
  Synthetic polynucleotide
atcatctcaccttgcctcctggggtcatcttcaatttgcctgcaggaaggtaattaccaataagaaaggtaattaccaatatcgaaggtaattaccaatagacaaggtaattaccaatactaaaggtaattaccaataactaaggtaattaccaatatgcggcgcgccatgcttcatcagactct

SEQ ID NO: 2497 - DNA, 185 bp, Artificial Sequence; identical to SEQ ID NO: 2496
  Synthetic polynucleotide

SEQ ID NO: 2498 - DNA, 185 bp, Artificial Sequence
  Synthetic polynucleotide
atcatctcaccttgcctcctggtaaattcgatgcactgcctgcagggtgccctctagtgggcagagtgccctctagtgggctcggtgccctctagtgggcgacgtgccctctagtgggcctagtgccctctagtgggcactgtgccctctagtgggctgcggcgcgccatgcttcatcagactct

SEQ ID NO: 2499 - DNA, 185 bp, Artificial Sequence; identical to SEQ ID NO: 2498
  Synthetic polynucleotide

SEQ ID NO: 2500 - DNA, 197 bp, Artificial Sequence
  Synthetic polynucleotide
atcatctcaccttgcctcctggggttcgttctcatccccctgcaggggggggtgactcatcagaggggggtgactcatctcgggggggtgactcatcgacggggggtgactcatcctaggggggtgactcatcactggggggtgactcatctgcggggggtgactcatcgtaggcgcgccatgcttcatcagactct

SEQ ID NO: 2501 - DNA, 197 bp, Artificial Sequence; identical to SEQ ID NO: 2500
  Synthetic polynucleotide

SEQ ID NO: 2502 - DNA, 190 bp, Artificial Sequence
  Synthetic polynucleotide
atcatctcaccttgcctcctggacgaatgatcacagaacctgcagggcgctgattggctgagagcgctgattggctgtcggcgctgattggctggacgcgctgattggctgctagcgctgattggctgactgcgctgattggctgtgcgcgctgattggctggtaggcgcgccatgcttcatcagactct

SEQ ID NO: 2503 - DNA, 190 bp, Artificial Sequence; identical to SEQ ID NO: 2502
  Synthetic polynucleotide

SEQ ID NO: 2504 - DNA, 172 bp, Artificial Sequence
  Synthetic polynucleotide
atcatctcaccttgcctcctgggtgttctgcggatgaacctgcaggcagctgttacagacagctgttactcgcagctgttacgaccagctgttacctacagctgttacactcagctgttactgccagctgttacgtacagctgttacggcgcgccatgcttcatcagactct

SEQ ID NO: 2505 - DNA, 172 bp, Artificial Sequence; identical to SEQ ID NO: 2504
  Synthetic polynucleotide

SEQ ID NO: 2506 - DNA, 196 bp, Artificial Sequence
  Synthetic polynucleotide
atcatctcaccttgcctcctgaaagcggcatggttgtgcctgcagggtgcgtacgtgggagagtgcgtacgtgggtcggtgcgtacgtggggacgtgcgtacgtgggctagtgcgtacgtgggactgtgcgtacgtgggtgcgtgcgtacgtggggtagtgcgtacgtgggggcgcgccatgcttcatcagactct

SEQ ID NO: 2507 - DNA, 196 bp, Artificial Sequence; identical to SEQ ID NO: 2506
  Synthetic polynucleotide

SEQ ID NO: 2508 - DNA, 197 bp, Artificial Sequence
  Synthetic polynucleotide
atcatctcaccttgcctcctggaacatggctcacggtgcctgcaggccacttcctctttttagaccacttcctcttttttcgccacttcctctttttgacccacttcctctttttctaccacttcctctttttactccacttcctcttttttgcccacttcctctttttgtaggcgcgccatgcttcatcagactct

SEQ ID NO: 2509 - DNA, 197 bp, Artificial Sequence; identical to SEQ ID NO: 2508
  Synthetic polynucleotide

SEQ ID NO: 2510 - DNA, 180 bp, Artificial Sequence
  Synthetic polynucleotide
atcatctcaccttgcctcctgaactatccacgaaccctcctgcaggcatgagtcaccagacatgagtcacctcgcatgagtcaccgaccatgagtcaccctacatgagtcaccactcatgagtcacctgccatgagtcaccgtacatgagtcaccggcgcgccatgcttcatcagactct

SEQ ID NO: 2511 - DNA, 180 bp, Artificial Sequence; identical to SEQ ID NO: 2510
  Synthetic polynucleotide

SEQ ID NO: 2512 - DNA, 191 bp, Artificial Sequence
  Synthetic polynucleotide
atcatctcaccttgcctcctggcggaacaacgcatttccctgcaggatttcctttgatctataagaatttcctttgatctatatcgatttcctttgatctatagacatttcctttgatctatactaatttcctttgatctataactatttcctttgatctatatgcggcgcgccatgcttcatcagactct

SEQ ID NO: 2513 - DNA, 191 bp, Artificial Sequence; identical to SEQ ID NO: 2512
  Synthetic polynucleotide

SEQ ID NO: 2514 - DNA, 180 bp, Artificial Sequence
  Synthetic polynucleotide
atcatctcaccttgcctcctgtttgcgtggtatagaggcctgcaggtgactcatttcagatgactcatttctcgtgactcatttcgactgactcatttcctatgactcatttcacttgactcatttctgctgactcatttcgtatgactcatttcggcgcgccatgcttcatcagactct

SEQ ID NO: 2515 - DNA, 180 bp, Artificial Sequence; identical to SEQ ID NO: 2514
  Synthetic polynucleotide

SEQ ID NO: 2516 - DNA, 188 bp, Artificial Sequence
  Synthetic polynucleotide
atcatctcaccttgcctcctgttgcactagaccaattacctgcaggaatcacgtgcttagaaatcacgtgctttcgaatcacgtgcttgacaatcacgtgcttctaaatcacgtgcttactaatcacgtgctttgcaatcacgtgcttgtaaatcacgtgcttggcgcgccatgcttcatcagactct

SEQ ID NO: 2517 - DNA, 188 bp, Artificial Sequence; identical to SEQ ID NO: 2516
  Synthetic polynucleotide

SEQ ID NO: 2518 - DNA, 191 bp, Artificial Sequence
  Synthetic polynucleotide
atcatctcaccttgcctcctgccgcattaactacgacgcctgcaggatcttcttatcagtttaagaatcttcttatcagtttatcgatcttcttatcagtttagacatcttcttatcagtttactaatcttcttatcagtttaactatcttcttatcagtttatgcggcgcgccatgcttcatcagactct

SEQ ID NO: 2519 - DNA, 191 bp, Artificial Sequence; identical to SEQ ID NO: 2518
  Synthetic polynucleotide

SEQ ID NO: 2520 - DNA, 156 bp, Artificial Sequence
  Synthetic polynucleotide
atcatctcaccttgcctcctggggattgagttggcgagcctgcaggccttatctagaccttatcttcgccttatctgacccttatctctaccttatctactccttatcttgcccttatctgtaccttatctggcgcgccatgcttcatcagactct

SEQ ID NO: 2521 - DNA, 156 bp, Artificial Sequence; identical to SEQ ID NO: 2520
  Synthetic polynucleotide

SEQ ID NO: 2522 - DNA, 180 bp, Artificial Sequence
  Synthetic polynucleotide
atcatctcaccttgcctcctgtgtattggcatgtagtacctgcaggggtcacgtgacagaggtcacgtgactcgggtcacgtgacgacggtcacgtgacctaggtcacgtgacactggtcacgtgactgcggtcacgtgacgtaggtcacgtgacggcgcgccatgcttcatcagactct

SEQ ID NO: 2523 - DNA, 180 bp, Artificial Sequence; identical to SEQ ID NO: 2522
  Synthetic polynucleotide

SEQ ID NO: 2524 - DNA, 191 bp, Artificial Sequence
  Synthetic polynucleotide
atcatctcaccttgcctcctgacacgtatagggtcatgcctgcaggggcgcgcggcggtgacgtgacagaggcgcgcggcggtgacgtgactcgggcgcgcggcggtgacgtgacgacggcgcgcggcggtgacgtgacctaggcgcgcggcggtgacgtgacactggcgcgccatgcttcatcagactct

SEQ ID NO: 2525 - DNA, 191 bp, Artificial Sequence; identical to SEQ ID NO: 2524
  Synthetic polynucleotide

SEQ ID NO: 2526 - DNA, 188 bp, Artificial Sequence
  Synthetic polynucleotide
atcatctcaccttgcctcctgcaacggaagccgtgaatcctgcaggtcataaatcatcagatcataaatcatctcgtcataaatcatcgactcataaatcatcctatcataaatcatcacttcataaatcatctgctcataaatcatcgtatcataaatcatcggcgcgccatgcttcatcagactct

SEQ ID NO: 2527 - DNA, 188 bp, Artificial Sequence; identical to SEQ ID NO: 2526
  Synthetic polynucleotide

SEQ ID NO: 2528 - DNA, 197 bp, Artificial Sequence
  Synthetic polynucleotide
atcatctcaccttgcctcctgattgagtcctgccctcccctgcaggccgggccacgtgaccagaccgggccacgtgacctcgccgggccacgtgaccgacccgggccacgtgaccctaccgggccacgtgaccactccgggccacgtgacctgcccgggccacgtgaccgtaggcgcgccatgcttcatcagactct

SEQ ID NO: 2529 - DNA, 197 bp, Artificial Sequence; identical to SEQ ID NO: 2528
  Synthetic polynucleotide

SEQ ID NO: 2530 - DNA, 172 bp, Artificial Sequence
  Synthetic polynucleotide
atcatctcaccttgcctcctgtctcagaaattagtcggcctgcaggtcaaggtcatagatcaaggtcattcgtcaaggtcatgactcaaggtcatctatcaaggtcatacttcaaggtcattgctcaaggtcatgtatcaaggtcatggcgcgccatgcttcatcagactct

SEQ ID NO: 2531 - DNA, 172 bp, Artificial Sequence; identical to SEQ ID NO: 2530
  Synthetic polynucleotide

SEQ ID NO: 2532 - DNA, 190 bp, Artificial Sequence
  Synthetic polynucleotide
atcatctcaccttgcctcctgggctcattagtagccaacctgcaggccccaaaccaccccagaccccaaaccacccctcgccccaaaccaccccgacccccaaaccaccccctaccccaaaccaccccactccccaaaccacccctgcccccaaaccaccccgtaggcgcgccatgcttcatcagactct

SEQ ID NO: 2533 - DNA, 190 bp, Artificial Sequence; identical to SEQ ID NO: 2532
  Synthetic polynucleotide

SEQ ID NO: 2534 - DNA, 172 bp, Artificial Sequence
  Synthetic polynucleotide
atcatctcaccttgcctcctgtttaggttctgtgccctcctgcaggccagctgacgagaccagctgacgtcgccagctgacggacccagctgacgctaccagctgacgactccagctgacgtgcccagctgacggtaccagctgacgggcgcgccatgcttcatcagactct

SEQ ID NO: 2535 - DNA, 172 bp, Artificial Sequence; identical to SEQ ID NO: 2534
  Synthetic polynucleotide

SEQ ID NO: 2536 - DNA, 197 bp, Artificial Sequence
  Synthetic polynucleotide
atcatctcaccttgcctcctgcgtataactcgtagagacctgcaggccataattaattacaagaccataattaattacatcgccataattaattacagacccataattaattacactaccataattaattacaactccataattaattacatgcccataattaattacagtaggcgcgccatgcttcatcagactct

SEQ ID NO: 2537 - DNA, 197 bp, Artificial Sequence; identical to SEQ ID NO: 2536
  Synthetic polynucleotide

SEQ ID NO: 2538 - DNA, 191 bp, Artificial Sequence
  Synthetic polynucleotide
atcatctcaccttgcctcctgtcttcgtaatgtcttgacctgcaggtgtagggattaattgtcagatgtagggattaattgtctcgtgtagggattaattgtcgactgtagggattaattgtcctatgtagggattaattgtcacttgtagggattaattgtctgcggcgcgccatgcttcatcagactct

SEQ ID NO: 2539 - DNA, 191 bp, Artificial Sequence; identical to SEQ ID NO: 2538
  Synthetic polynucleotide

SEQ ID NO: 2540 - DNA, 188 bp, Artificial Sequence
  Synthetic polynucleotide
atcatctcaccttgcctcctgatattgcactgcacctgcctgcaggtgtgggaaaagcagatgtgggaaaagctcgtgtgggaaaagcgactgtgggaaaagcctatgtgggaaaagcacttgtgggaaaagctgctgtgggaaaagcgtatgtgggaaaagcggcgcgccatgcttcatcagactct

SEQ ID NO: 2541 - DNA, 188 bp, Artificial Sequence; identical to SEQ ID NO: 2540
  Synthetic polynucleotide

SEQ ID NO: 2542 - DNA, 190 bp, Artificial Sequence
  Synthetic polynucleotide
atcatctcaccttgcctcctgcattagtgaagctttagcctgcaggagaatgttctagaaagaagaatgttctagaatcgagaatgttctagaagacagaatgttctagaactaagaatgttctagaaactagaatgttctagaatgcagaatgttctagaagtaggcgcgccatgcttcatcagactct

SEQ ID NO: 2543 - DNA, 190 bp, Artificial Sequence; identical to SEQ ID NO: 2542
  Synthetic polynucleotide

SEQ ID NO: 2544 - DNA, 156 bp, Artificial Sequence
  Synthetic polynucleotide
atcatctcaccttgcctcctgcaattccacccactctccctgcaggtctgttctagatctgttcttcgtctgttctgactctgttctctatctgttctacttctgttcttgctctgttctgtatctgttctggcgcgccatgcttcatcagactct

SEQ ID NO: 2545 - DNA, 156 bp, Artificial Sequence; identical to SEQ ID NO: 2544
  Synthetic polynucleotide

SEQ ID NO: 2546 - DNA, 200 bp, Artificial Sequence
  Synthetic polynucleotide
atcatctcaccttgcctcctgcgttgatcccacacggtcctgcagggtcacgcttcactgccctcagagtcacgcttcactgccctctcggtcacgcttcactgccctcgacgtcacgcttcactgccctcctagtcacgcttcactgccctcactgtcacgcttcactgccctcggcgcgccatgcttcatcagactct

SEQ ID NO: 2547 - DNA, 200 bp, Artificial Sequence; identical to SEQ ID NO: 2546
  Synthetic polynucleotide

SEQ ID NO: 2548 - DNA, 197 bp, Artificial Sequence
  Synthetic polynucleotide
atcatctcaccttgcctcctgatatacgctcgatcagacctgcagggccagcagctggcgcagagccagcagctggcgctcggccagcagctggcgcgacgccagcagctggcgcctagccagcagctggcgcactgccagcagctggcgctgcgccagcagctggcgcgtaggcgcgccatgcttcatcagactct

SEQ ID NO: 2549 - DNA, 197 bp, Artificial Sequence; identical to SEQ ID NO: 2548
  Synthetic polynucleotide

SEQ ID NO: 2550 - DNA, 164 bp, Artificial Sequence
  Synthetic polynucleotide
atcatctcaccttgcctcctgctgtggatgctgcgacacctgcaggaacacctggagaaacacctggtcgaacacctgggacaacacctggctaaacacctggactaacacctggtgcaacacctgggtaaacacctggggcgcgccatgcttcatcagactct

SEQ ID NO: 2551 - DNA, 164 bp, Artificial Sequence; identical to SEQ ID NO: 2550
  Synthetic polynucleotide

SEQ ID NO: 2552 - DNA, 197 bp, Artificial Sequence
  Synthetic polynucleotide
atcatctcaccttgcctcctggcagttgatgctcgtgccctgcaggctggcaaattgccaaagactggcaaattgccaatcgctggcaaattgccaagacctggcaaattgccaactactggcaaattgccaaactctggcaaattgccaatgcctggcaaattgccaagtaggcgcgccatgcttcatcagactct

SEQ ID NO: 2553 - DNA, 197 bp, Artificial Sequence; identical to SEQ ID NO: 2552
  Synthetic polynucleotide

SEQ ID NO: 2554 - DNA, 196 bp, Artificial Sequence
  Synthetic polynucleotide
atcatctcaccttgcctcctgcataattaatgcgcctacctgcaggggatgatgcaataagaggatgatgcaatatcgggatgatgcaatagacggatgatgcaatactaggatgatgcaataactggatgatgcaatatgcggatgatgcaatagtaggatgatgcaataggcgcgccatgcttcatcagactct

SEQ ID NO: 2555 - DNA, 196 bp, Artificial Sequence; identical to SEQ ID NO: 2554
  Synthetic polynucleotide

SEQ ID NO: 2556 - DNA, 172 bp, Artificial Sequence
  Synthetic polynucleotide
atcatctcaccttgcctcctgctcgtccaatttcgaggcctgcaggaaagatcttaagaaaagatcttatcgaaagatcttagacaaagatcttactaaaagatcttaactaaagatcttatgcaaagatcttagtaaaagatcttaggcgcgccatgcttcatcagactct

SEQ ID NO: 2557 - DNA, 172 bp, Artificial Sequence; identical to SEQ ID NO: 2556
  Synthetic polynucleotide

SEQ ID NO: 2558 - DNA, 172 bp, Artificial Sequence
  Synthetic polynucleotide
atcatctcaccttgcctcctgtatactcatcgttaggacctgcaggaaacatggcgagaaaacatggcgtcgaaacatggcggacaaacatggcgctaaaacatggcgactaaacatggcgtgcaaacatggcggtaaaacatggcgggcgcgccatgcttcatcagactct

SEQ ID NO: 2559 - DNA, 172 bp, Artificial Sequence; identical to SEQ ID NO: 2558
  Synthetic polynucleotide

SEQ ID NO: 2560 - DNA, 196 bp, Artificial Sequence
  Synthetic polynucleotide
atcatctcaccttgcctcctgtcatggtttcctcatgacctgcaggtacttacctgtgtagatacttacctgtgttcgtacttacctgtgtgactacttacctgtgtctatacttacctgtgtacttacttacctgtgttgctacttacctgtgtgtatacttacctgtgtggcgcgccatgcttcatcagactct

SEQ ID NO: 2561 - DNA, 196 bp, Artificial Sequence; identical to SEQ ID NO: 2560
  Synthetic polynucleotide

SEQ ID NO: 2562 - DNA, 200 bp, Artificial Sequence
  Synthetic polynucleotide
atcatctcaccttgcctcctgcggcaacgataattattcctgcaggtggccaccagggggcgctaagatggccaccagggggcgctatcgtggccaccagggggcgctagactggccaccagggggcgctactatggccaccagggggcgctaacttggccaccagggggcgctaggcgcgccatgcttcatcagactct

SEQ ID NO: 2563 - DNA, 200 bp, Artificial Sequence; identical to SEQ ID NO: 2562
  Synthetic polynucleotide

SEQ ID NO: 2564 - DNA, 172 bp, Artificial Sequence
  Synthetic polynucleotide
atcatctcaccttgcctcctgccggcctcaatgaaacacctgcaggatcacgtgacagaatcacgtgactcgatcacgtgacgacatcacgtgacctaatcacgtgacactatcacgtgactgcatcacgtgacgtaatcacgtgacggcgcgccatgcttcatcagactct

SEQ ID NO: 2565 - DNA, 172 bp, Artificial Sequence; identical to SEQ ID NO: 2564
  Synthetic polynucleotide

SEQ ID NO: 2566 - DNA, 156 bp, Artificial Sequence
  Synthetic polynucleotide
atcatctcaccttgcctcctgcagtaagctagtagacgcctgcaggttgattacagattgattactcgttgattacgacttgattacctattgattacactttgattactgcttgattacgtattgattacggcgcgccatgcttcatcagactct

SEQ ID NO: 2567 - DNA, 156 bp, Artificial Sequence; identical to SEQ ID NO: 2566
  Synthetic polynucleotide

SEQ ID NO: 2568 - DNA, 185 bp, Artificial Sequence
  Synthetic polynucleotide
atcatctcaccttgcctcctgcgacctcggatgtttgacctgcaggatttgcataacaaaggagaatttgcataacaaaggtcgatttgcataacaaagggacatttgcataacaaaggctaatttgcataacaaaggactatttgcataacaaaggtgcggcgcgccatgcttcatcagactct

SEQ ID NO: 2569 - DNA, 185 bp, Artificial Sequence; identical to SEQ ID NO: 2568
  Synthetic polynucleotide

SEQ ID NO: 2570 - DNA, 132 bp, Artificial Sequence
  Synthetic polynucleotide
atcatctcaccttgcctcctgcgaagtaggtcaacagacctgcaggtgttaagatgttatcgtgttagactgttactatgttaacttgttatgctgttagtatgttaggcgcgccatgcttcatcagactct

SEQ ID NO: 2571 - DNA, 132 bp, Artificial Sequence; identical to SEQ ID NO: 2570
  Synthetic polynucleotide

SEQ ID NO: 2572 - DNA, 156 bp, Artificial Sequence
  Synthetic polynucleotide
atcatctcaccttgcctcctgttcagattcgccacctccctgcaggttgtttttagattgttttttcgttgtttttgacttgtttttctattgtttttactttgttttttgcttgtttttgtattgtttttggcgcgccatgcttcatcagactct

SEQ ID NO: 2573 - DNA, 156 bp, Artificial Sequence; identical to SEQ ID NO: 2572
  Synthetic polynucleotide

SEQ ID NO: 2574 - DNA, 197 bp, Artificial Sequence
  Synthetic polynucleotide
atcatctcaccttgcctcctgggtacctcatctagggccctgcaggtcagtttcgttttccagatcagtttcgttttcctcgtcagtttcgttttccgactcagtttcgttttccctatcagtttcgttttccacttcagtttcgttttcctgctcagtttcgttttccgtaggcgcgccatgcttcatcagactct

SEQ ID NO: 2575 - DNA, 197 bp, Artificial Sequence; identical to SEQ ID NO: 2574
  Synthetic polynucleotide

SEQ ID NO: 2576 - DNA, 186 bp, Artificial Sequence
  Synthetic polynucleotide
atcatctcaccttgcctcctgactatagtggcgacggtcctgcaggagacatgcccgggcatgtccagaagacatgcccgggcatgtcctcgagacatgcccgggcatgtccgacagacatgcccgggcatgtccctaagacatgcccgggcatgtccactggcgcgccatgcttcatcagactct

SEQ ID NO: 2577 - DNA, 186 bp, Artificial Sequence; identical to SEQ ID NO: 2576
  Synthetic polynucleotide

SEQ ID NO: 2578 - DNA, 172 bp, Artificial Sequence
  Synthetic polynucleotide
atcatctcaccttgcctcctgacggagggcaaccataacctgcagggctaatccccagagctaatcccctcggctaatccccgacgctaatccccctagctaatccccactgctaatcccctgcgctaatccccgtagctaatccccggcgcgccatgcttcatcagactct

SEQ ID NO: 2579 - DNA, 172 bp, Artificial Sequence; identical to SEQ ID NO: 2578
  Synthetic polynucleotide

SEQ ID NO: 2580 - DNA, 179 bp, Artificial Sequence
  Synthetic polynucleotide
atcatctcaccttgcctcctgattccgaccggacagatcctgcaggggggccagggggggggcggggccgagaggggccagggggggggcggggccgtcgggggccagggggggggcggggccggacggggccagggggggggcggggccgctaggcgcgccatgcttcatcagactct

SEQ ID NO: 2581 - DNA, 179 bp, Artificial Sequence; identical to SEQ ID NO: 2580
  Synthetic polynucleotide

SEQ ID NO: 2582 - DNA, 172 bp, Artificial Sequence
  Synthetic polynucleotide
atcatctcaccttgcctcctgctggcatctccactactcctgcaggatcacgtgatagaatcacgtgattcgatcacgtgatgacatcacgtgatctaatcacgtgatactatcacgtgattgcatcacgtgatgtaatcacgtgatggcgcgccatgcttcatcagactct

SEQ ID NO: 2583 - DNA, 172 bp, Artificial Sequence; identical to SEQ ID NO: 2582
  Synthetic polynucleotide

SEQ ID NO: 2584 - DNA, 197 bp, Artificial Sequence
  Synthetic polynucleotide
atcatctcaccttgcctcctgcagttactgcagagattcctgcaggccccgggcacccgggagaccccgggcacccgggtcgccccgggcacccggggacccccgggcacccgggctaccccgggcacccgggactccccgggcacccgggtgcccccgggcacccggggtaggcgcgccatgcttcatcagactct

SEQ ID NO: 2585 - DNA, 197 bp, Artificial Sequence; identical to SEQ ID NO: 2584
  Synthetic polynucleotide

SEQ ID NO: 2586 - DNA, 185 bp, Artificial Sequence
  Synthetic polynucleotide
atcatctcaccttgcctcctgtatgctactcctttcgccctgcaggattggactttgaccccagaattggactttgacccctcgattggactttgaccccgacattggactttgaccccctaattggactttgaccccactattggactttgacccctgcggcgcgccatgcttcatcagactct

SEQ ID NO: 2587 - DNA, 185 bp, Artificial Sequence; identical to SEQ ID NO: 2586
  Synthetic polynucleotide

SEQ ID NO: 2588 - DNA, 180 bp, Artificial Sequence
  Synthetic polynucleotide
atcatctcaccttgcctcctggagcagtgtagagaaaccctgcagggaatgatatccagagaatgatatcctcggaatgatatccgacgaatgatatccctagaatgatatccactgaatgatatcctgcgaatgatatccgtagaatgatatccggcgcgccatgcttcatcagactct

SEQ ID NO: 2589 - DNA, 180 bp, Artificial Sequence; identical to SEQ ID NO: 2588
  Synthetic polynucleotide

SEQ ID NO: 2590 - DNA, 197 bp, Artificial Sequence
  Synthetic polynucleotide
atcatctcaccttgcctcctgattctggacgatcgctacctgcaggtgacctctgacccctagatgacctctgaccccttcgtgacctctgacccctgactgacctctgacccctctatgacctctgacccctacttgacctctgaccccttgctgacctctgacccctgtaggcgcgccatgcttcatcagactct

SEQ ID NO: 2591 - DNA, 197 bp, Artificial Sequence; identical to SEQ ID NO: 2590
  Synthetic polynucleotide

SEQ ID NO: 2592 - DNA, 156 bp, Artificial Sequence
  Synthetic polynucleotide
atcatctcaccttgcctcctgcctaatgaagcttgattcctgcaggaggtcacgagaaggtcacgtcgaggtcacggacaggtcacgctaaggtcacgactaggtcacgtgcaggtcacggtaaggtcacgggcgcgccatgcttcatcagactct

SEQ ID NO: 2593 - DNA, 156 bp, Artificial Sequence; identical to SEQ ID NO: 2592
  Synthetic polynucleotide

SEQ ID NO: 2594 - DNA, 172 bp, Artificial Sequence
  Synthetic polynucleotide
atcatctcaccttgcctcctgcgacctaacgttcatgccctgcaggaccccgccccagaaccccgcccctcgaccccgccccgacaccccgccccctaaccccgccccactaccccgcccctgcaccccgccccgtaaccccgccccggcgcgccatgcttcatcagactct

SEQ ID NO: 2595 - DNA, 172 bp, Artificial Sequence; identical to SEQ ID NO: 2594
  Synthetic polynucleotide

SEQ ID NO: 2596 - DNA, 196 bp, Artificial Sequence
  Synthetic polynucleotide
atcatctcaccttgcctcctgggatgtgtgccgttgtccctgcagggttacttcctgtcagagttacttcctgtctcggttacttcctgtcgacgttacttcctgtcctagttacttcctgtcactgttacttcctgtctgcgttacttcctgtcgtagttacttcctgtcggcgcgccatgcttcatcagactct

SEQ ID NO: 2597 - DNA, 196 bp, Artificial Sequence; identical to SEQ ID NO: 2596
  Synthetic polynucleotide

SEQ ID NO: 2598 - DNA, 197 bp, Artificial Sequence
  Synthetic polynucleotide
atcatctcaccttgcctcctgggcaattactgggctctcctgcaggaacaattgcagtgttagaaacaattgcagtgtttcgaacaattgcagtgttgacaacaattgcagtgttctaaacaattgcagtgttactaacaattgcagtgtttgcaacaattgcagtgttgtaggcgcgccatgcttcatcagactct

SEQ ID NO: 2599 - DNA, 197 bp, Artificial Sequence; identical to SEQ ID NO: 2598
  Synthetic polynucleotide

SEQ ID NO: 2600 - DNA, 200 bp, Artificial Sequence
  Synthetic polynucleotide
atcatctcaccttgcctcctgggccgaaactgaatattcctgcaggggggatcgcgtgacaacccagaggggatcgcgtgacaaccctcgggggatcgcgtgacaacccgacggggatcgcgtgacaacccctaggggatcgcgtgacaacccactggggatcgcgtgacaacccggcgcgccatgcttcatcagactct

SEQ ID NO: 2601 - DNA, 200 bp, Artificial Sequence; identical to SEQ ID NO: 2600
  Synthetic polynucleotide

SEQ ID NO: 2602 - DNA, 156 bp, Artificial Sequence
  Synthetic polynucleotide
atcatctcaccttgcctcctgacaactactgattccaccctgcaggtatcacttagatatcactttcgtatcacttgactatcacttctatatcacttacttatcactttgctatcacttgtatatcacttggcgcgccatgcttcatcagactct

SEQ ID NO: 2603 - DNA, 156 bp, Artificial Sequence; identical to SEQ ID NO: 2602
  Synthetic polynucleotide

SEQ ID NO: 2604 - DNA, 164 bp, Artificial Sequence
  Synthetic polynucleotide
atcatctcaccttgcctcctgtgaagcgctgcaatgatcctgcaggtaattaagaagataattaagatcgtaattaagagactaattaagactataattaagaacttaattaagatgctaattaagagtataattaagaggcgcgccatgcttcatcagactct

SEQ ID NO: 2605 - DNA, 164 bp, Artificial Sequence; identical to SEQ ID NO: 2604
  Synthetic polynucleotide

SEQ ID NO: 2606 - DNA, 197 bp, Artificial Sequence
  Synthetic polynucleotide
atcatctcaccttgcctcctgtctatatgaagaagaggcctgcaggcaataatccgtttttagacaataatccgttttttcgcaataatccgtttttgaccaataatccgtttttctacaataatccgtttttactcaataatccgttttttgccaataatccgtttttgtaggcgcgccatgcttcatcagactct

SEQ ID NO: 2607 - DNA, 197 bp, Artificial Sequence; identical to SEQ ID NO: 2606
  Synthetic polynucleotide

SEQ ID NO: 2608 - DNA, 200 bp, Artificial Sequence
  Synthetic polynucleotide
atcatctcaccttgcctcctggagactagtttcccgaccctgcaggtgggtacactgtgttctagagatgggtacactgtgttctagtcgtgggtacactgtgttctaggactgggtacactgtgttctagctatgggtacactgtgttctagacttgggtacactgtgttctagggcgcgccatgcttcatcagactct

SEQ ID NO: 2609 - DNA, 200 bp, Artificial Sequence; identical to SEQ ID NO: 2608
  Synthetic polynucleotide

SEQ ID NO: 2610 - DNA, 156 bp, Artificial Sequence
  Synthetic polynucleotide
atcatctcaccttgcctcctggcaggacagaacatcggcctgcagggagatcaaagagagatcaatcggagatcaagacgagatcaactagagatcaaactgagatcaatgcgagatcaagtagagatcaaggcgcgccatgcttcatcagactct

SEQ ID NO: 2611 - DNA, 156 bp, Artificial Sequence; identical to SEQ ID NO: 2610
  Synthetic polynucleotide

SEQ ID NO: 2612 - DNA, 188 bp, Artificial Sequence
  Synthetic polynucleotide
atcatctcaccttgcctcctgttgatcctgtgattcgccctgcaggatgttaacataaagaatgttaacataatcgatgttaacataagacatgttaacataactaatgttaacataaactatgttaacataatgcatgttaacataagtaatgttaacataaggcgcgccatgcttcatcagactct

SEQ ID NO: 2613 - DNA, 188 bp, Artificial Sequence; identical to SEQ ID NO: 2612
  Synthetic polynucleotide

SEQ ID NO: 2614 - DNA, 180 bp, Artificial Sequence
  Synthetic polynucleotide
atcatctcaccttgcctcctgccctttgtttacagctacctgcaggggcgtgggcggagaggcgtgggcggtcgggcgtgggcgggacggcgtgggcggctaggcgtgggcggactggcgtgggcggtgcggcgtgggcgggtaggcgtgggcggggcgcgccatgcttcatcagactct

SEQ ID NO: 2615 - DNA, 180 bp, Artificial Sequence; identical to SEQ ID NO: 2614
  Synthetic polynucleotide

SEQ ID NO: 2616 - DNA, 148 bp, Artificial Sequence
  Synthetic polynucleotide
atcatctcaccttgcctcctggttgaatccatcttccgcctgcaggaggaagtagaaggaagttcgaggaagtgacaggaagtctaaggaagtactaggaagttgcaggaagtgtaaggaagtggcgcgccatgcttcatcagactct

SEQ ID NO: 2617 - DNA, 148 bp, Artificial Sequence; identical to SEQ ID NO: 2616
  Synthetic polynucleotide

SEQ ID NO: 2618 - DNA, 186 bp, Artificial Sequence
  Synthetic polynucleotide
atcatctcaccttgcctcctgcggcgttgtatgtacagcctgcaggggccaccagatggcactataagaggccaccagatggcactatatcgggccaccagatggcactatagacggccaccagatggcactatactaggccaccagatggcactataactggcgcgccatgcttcatcagactct

SEQ ID NO: 2619 - DNA, 186 bp, Artificial Sequence; identical to SEQ ID NO: 2618
  Synthetic polynucleotide

SEQ ID NO: 2620 - DNA, 191 bp, Artificial Sequence
  Synthetic polynucleotide
atcatctcaccttgcctcctgtatcagcccatcactcacctgcaggaaaacatcgtttttaagagaaaaacatcgtttttaagtcgaaaacatcgtttttaaggacaaaacatcgtttttaagctaaaaacatcgtttttaagactaaaacatcgtttttaagtgcggcgcgccatgcttcatcagactct

SEQ ID NO: 2621 - DNA, 191 bp, Artificial Sequence; identical to SEQ ID NO: 2620
  Synthetic polynucleotide

SEQ ID NO: 2622 - DNA, 185 bp, Artificial Sequence
  Synthetic polynucleotide
atcatctcaccttgcctcctgacagacgcttaggataacctgcaggagggggattagctgccagaagggggattagctgcctcgagggggattagctgccgacagggggattagctgccctaagggggattagctgccactagggggattagctgcctgcggcgcgccatgcttcatcagactct

SEQ ID NO: 2623 - DNA, 185 bp, Artificial Sequence; identical to SEQ ID NO: 2622
  Synthetic polynucleotide

SEQ ID NO: 2624 - DNA, 197 bp, Artificial Sequence
  Synthetic polynucleotide
atcatctcaccttgcctcctgcggattagtgctctatccctgcaggcccctcccccaccccagacccctcccccacccctcgcccctcccccaccccgaccccctcccccaccccctacccctcccccaccccactcccctcccccacccctgccccctcccccaccccgtaggcgcgccatgcttcatcagactct

SEQ ID NO: 2625 - DNA, 197 bp, Artificial Sequence; identical to SEQ ID NO: 2624
  Synthetic polynucleotide

SEQ ID NO: 2626 - DNA, 156 bp, Artificial Sequence
  Synthetic polynucleotide
atcatctcaccttgcctcctgcgtccaatatgaccaatcctgcaggtagggtacagatagggtactcgtagggtacgactagggtacctatagggtacacttagggtactgctagggtacgtatagggtacggcgcgccatgcttcatcagactct

SEQ ID NO: 2627 - DNA, 156 bp, Artificial Sequence; identical to SEQ ID NO: 2626
  Synthetic polynucleotide

SEQ ID NO: 2628 - DNA, 190 bp, Artificial Sequence
  Synthetic polynucleotide
atcatctcaccttgcctcctgccctgtcgcagggtaatcctgcaggtgacctttgtcctaagatgacctttgtcctatcgtgacctttgtcctagactgacctttgtcctactatgacctttgtcctaacttgacctttgtcctatgctgacctttgtcctagtaggcgcgccatgcttcatcagactct

SEQ ID NO: 2629 - DNA, 190 bp, Artificial Sequence; identical to SEQ ID NO: 2628
  Synthetic polynucleotide

SEQ ID NO: 2630 - DNA, 156 bp, Artificial Sequence
  Synthetic polynucleotide
atcatctcaccttgcctcctgatcgaaaggacctgcaccctgcaggaacaaaggagaaacaaaggtcgaacaaagggacaacaaaggctaaacaaaggactaacaaaggtgcaacaaagggtaaacaaaggggcgcgccatgcttcatcagactct

SEQ ID NO: 2631 - DNA, 156 bp, Artificial Sequence; identical to SEQ ID NO: 2630
  Synthetic polynucleotide

SEQ ID NO: 2632 - DNA, 156 bp, Artificial Sequence
  Synthetic polynucleotide
atcatctcaccttgcctcctgatgggtctaattagtcccctgcaggcacttgagagacacttgagtcgcacttgaggaccacttgagctacacttgagactcacttgagtgccacttgaggtacacttgagggcgcgccatgcttcatcagactct

SEQ ID NO: 2633 - DNA, 156 bp, Artificial Sequence; identical to SEQ ID NO: 2632
  Synthetic polynucleotide

SEQ ID NO: 2634 - DNA, 196 bp, Artificial Sequence
  Synthetic polynucleotide
atcatctcaccttgcctcctgatatggaatctctccgccctgcaggtggactttgacctagatggactttgaccttcgtggactttgacctgactggactttgacctctatggactttgacctacttggactttgaccttgctggactttgacctgtatggactttgacctggcgcgccatgcttcatcagactct

SEQ ID NO: 2635 - DNA, 196 bp, Artificial Sequence; identical to SEQ ID NO: 2634
  Synthetic polynucleotide

SEQ ID NO: 2636 - DNA, 172 bp, Artificial Sequence
  Synthetic polynucleotide
atcatctcaccttgcctcctgcgatcttacattatccgcctgcagggccacgcccaagagccacgcccatcggccacgcccagacgccacgcccactagccacgcccaactgccacgcccatgcgccacgcccagtagccacgcccaggcgcgccatgcttcatcagactct

SEQ ID NO: 2637 - DNA, 172 bp, Artificial Sequence; identical to SEQ ID NO: 2636
  Synthetic polynucleotide

SEQ ID NO: 2638 - DNA, 196 bp, Artificial Sequence
  Synthetic polynucleotide
atcatctcaccttgcctcctgcagatcctaccaaacctcctgcagggggttaatgacctagagggttaatgaccttcggggttaatgacctgacgggttaatgacctctagggttaatgacctactgggttaatgaccttgcgggttaatgacctgtagggttaatgacctggcgcgccatgcttcatcagactct

SEQ ID NO: 2639 - DNA, 196 bp, Artificial Sequence; identical to SEQ ID NO: 2638
  Synthetic polynucleotide

SEQ ID NO: 2640 - DNA, 164 bp, Artificial Sequence
  Synthetic polynucleotide
atcatctcaccttgcctcctgatttagagtctccatcgcctgcagggcctggggcagagcctggggctcggcctggggcgacgcctggggcctagcctggggcactgcctggggctgcgcctggggcgtagcctggggcggcgcgccatgcttcatcagactct

SEQ ID NO: 2641 - DNA, 164 bp, Artificial Sequence; identical to SEQ ID NO: 2640
  Synthetic polynucleotide

SEQ ID NO: 2642 - DNA, 148 bp, Artificial Sequence
  Synthetic polynucleotide
atcatctcaccttgcctcctgatcgtctagacagcccacctgcaggaatgactagaaatgacttcgaatgactgacaatgactctaaatgactactaatgacttgcaatgactgtaaatgactggcgcgccatgcttcatcagactct

SEQ ID NO: 2643 - DNA, 148 bp, Artificial Sequence; identical to SEQ ID NO: 2642
  Synthetic polynucleotide

SEQ ID NO: 2644 - DNA, 164 bp, Artificial Sequence
  Synthetic polynucleotide
atcatctcaccttgcctcctgttaaccaggctacgtagcctgcaggccaattaaaagaccaattaaatcgccaattaaagacccaattaaactaccaattaaaactccaattaaatgcccaattaaagtaccaattaaaggcgcgccatgcttcatcagactct

SEQ ID NO: 2645 - DNA, 164 bp, Artificial Sequence; identical to SEQ ID NO: 2644
  Synthetic polynucleotide

SEQ ID NO: 2646 - DNA, 197 bp, Artificial Sequence
  Synthetic polynucleotide
atcatctcaccttgcctcctgtggcaagccgccatttacctgcaggaggtcaccgtgacccagaaggtcaccgtgaccctcgaggtcaccgtgacccgacaggtcaccgtgacccctaaggtcaccgtgacccactaggtcaccgtgaccctgcaggtcaccgtgacccgtaggcgcgccatgcttcatcagactct

SEQ ID NO: 2647 - DNA, 197 bp, Artificial Sequence; identical to SEQ ID NO: 2646
  Synthetic polynucleotide

SEQ ID NO: 2648 - DNA, 197 bp, Artificial Sequence
  Synthetic polynucleotide
atcatctcaccttgcctcctggcggtggaagatatcctcctgcaggaacaatttcagtgttagaaacaatttcagtgtttcgaacaatttcagtgttgacaacaatttcagtgttctaaacaatttcagtgttactaacaatttcagtgtttgcaacaatttcagtgttgtaggcgcgccatgcttcatcagactct

SEQ ID NO: 2649 - DNA, 197 bp, Artificial Sequence; identical to SEQ ID NO: 2648
  Synthetic polynucleotide

SEQ ID NO: 2650 - DNA, 188 bp, Artificial Sequence
  Synthetic polynucleotide
atcatctcaccttgcctcctggacaacatgattcgcaccctgcagggcgtcagctgttagagcgtcagctgtttcggcgtcagctgttgacgcgtcagctgttctagcgtcagctgttactgcgtcagctgtttgcgcgtcagctgttgtagcgtcagctgttggcgcgccatgcttcatcagactct

SEQ ID NO: 2651 - DNA, 188 bp, Artificial Sequence; identical to SEQ ID NO: 2650
  Synthetic polynucleotide

SEQ ID NO: 2652 - DNA, 172 bp, Artificial Sequence
  Synthetic polynucleotide
atcatctcaccttgcctcctggttgcttaagtctttgtcctgcaggttttgcgccaagattttgcgccatcgttttgcgccagacttttgcgccactattttgcgccaactttttgcgccatgcttttgcgccagtattttgcgccaggcgcgccatgcttcatcagactct

SEQ ID NO: 2653 - DNA, 172 bp, Artificial Sequence; identical to SEQ ID NO: 2652
  Synthetic polynucleotide

SEQ ID NO: 2654 - DNA, 188 bp, Artificial Sequence
  Synthetic polynucleotide
atcatctcaccttgcctcctgtgcgtcactctttgcagcctgcaggtgtatgctaattagatgtatgctaatttcgtgtatgctaattgactgtatgctaattctatgtatgctaattacttgtatgctaatttgctgtatgctaattgtatgtatgctaattggcgcgccatgcttcatcagactct

SEQ ID NO: 2655 - DNA, 188 bp, Artificial Sequence; identical to SEQ ID NO: 2654
  Synthetic polynucleotide

SEQ ID NO: 2656 - DNA, 156 bp, Artificial Sequence
  Synthetic polynucleotide
atcatctcaccttgcctcctggtaggcagtgctgttgccctgcaggacttccggagaacttccggtcgacttccgggacacttccggctaacttccggactacttccggtgcacttccgggtaacttccggggcgcgccatgcttcatcagactct

SEQ ID NO: 2657 - DNA, 156 bp, Artificial Sequence; identical to SEQ ID NO: 2656
  Synthetic polynucleotide

SEQ ID NO: 2658 - DNA, 140 bp, Artificial Sequence
  Synthetic polynucleotide
atcatctcaccttgcctcctgggtagaactgaccgtcacctgcaggctgtcaagactgtcatcgctgtcagacctgtcactactgtcaactctgtcatgcctgtcagtactgtcaggcgcgccatgcttcatcagactct

SEQ ID NO: 2659 - DNA, 140 bp, Artificial Sequence; identical to SEQ ID NO: 2658
  Synthetic polynucleotide

SEQ ID NO: 2660 - DNA, 186 bp, Artificial Sequence
  Synthetic polynucleotide
atcatctcaccttgcctcctggattctagagtccactgcctgcagggcaaggcattatgggaaatcagagcaaggcattatgggaaatctcggcaaggcattatgggaaatcgacgcaaggcattatgggaaatcctagcaaggcattatgggaaatcactggcgcgccatgcttcatcagactct

SEQ ID NO: 2661 - DNA, 186 bp, Artificial Sequence; identical to SEQ ID NO: 2660
  Synthetic polynucleotide

SEQ ID NO: 2662 - DNA, 156 bp, Artificial Sequence
  Synthetic polynucleotide
atcatctcaccttgcctcctgttatactgtggtacacccctgcaggcgcccacgagacgcccacgtcgcgcccacggaccgcccacgctacgcccacgactcgcccacgtgccgcccacggtacgcccacgggcgcgccatgcttcatcagactct

SEQ ID NO: 2663 - DNA, 156 bp, Artificial Sequence; identical to SEQ ID NO: 2662
  Synthetic polynucleotide

SEQ ID NO: 2664 - DNA, 188 bp, Artificial Sequence
  Synthetic polynucleotide
atcatctcaccttgcctcctgcctacctacaccaggaacctgcaggtaagtaaacaaaagataagtaaacaaatcgtaagtaaacaaagactaagtaaacaaactataagtaaacaaaacttaagtaaacaaatgctaagtaaacaaagtataagtaaacaaaggcgcgccatgcttcatcagactct

SEQ ID NO: 2665 - DNA, 188 bp, Artificial Sequence; identical to SEQ ID NO: 2664
  Synthetic polynucleotide

SEQ ID NO: 2666 - DNA, 172 bp, Artificial Sequence
  Synthetic polynucleotide
atcatctcaccttgcctcctgcagagaacggttgcgtccctgcaggggcacgcgtcagaggcacgcgtctcgggcacgcgtcgacggcacgcgtcctaggcacgcgtcactggcacgcgtctgcggcacgcgtcgtaggcacgcgtcggcgcgccatgcttcatcagactct

SEQ ID NO: 2667 - DNA, 172 bp, Artificial Sequence; identical to SEQ ID NO: 2666
  Synthetic polynucleotide

SEQ ID NO: 2668 - DNA, 188 bp, Artificial Sequence
  Synthetic polynucleotide
atcatctcaccttgcctcctgaaccgcgatcctaagtccctgcaggcacattcctccgagacacattcctccgtcgcacattcctccggaccacattcctccgctacacattcctccgactcacattcctccgtgccacattcctccggtacacattcctccgggcgcgccatgcttcatcagactct

SEQ ID NO: 2669 - DNA, 188 bp, Artificial Sequence; identical to SEQ ID NO: 2668
  Synthetic polynucleotide

SEQ ID NO: 2670 - DNA, 180 bp, Artificial Sequence
  Synthetic polynucleotide
atcatctcaccttgcctcctgtgatccctctatgtgtgcctgcaggacagataagaaagaacagataagaatcgacagataagaagacacagataagaactaacagataagaaactacagataagaatgcacagataagaagtaacagataagaaggcgcgccatgcttcatcagactct

SEQ ID NO: 2671 - DNA, 180 bp, Artificial Sequence; identical to SEQ ID NO: 2670
  Synthetic polynucleotide

SEQ ID NO: 2672 - DNA, 156 bp, Artificial Sequence
  Synthetic polynucleotide
atcatctcaccttgcctcctgttgtgcgcaggcctttacctgcagggtgaacttagagtgaactttcggtgaacttgacgtgaacttctagtgaacttactgtgaactttgcgtgaacttgtagtgaacttggcgcgccatgcttcatcagactct

SEQ ID NO: 2673 - DNA, 156 bp, Artificial Sequence; identical to SEQ ID NO: 2672
  Synthetic polynucleotide

SEQ ID NO: 2674 - DNA, 156 bp, Artificial Sequence
  Synthetic polynucleotide
atcatctcaccttgcctcctgaggatatattaacgcgccctgcaggttatgacaagattatgacatcgttatgacagacttatgacactattatgacaactttatgacatgcttatgacagtattatgacaggcgcgccatgcttcatcagactct

SEQ ID NO: 2675 - DNA, 156 bp, Artificial Sequence; identical to SEQ ID NO: 2674
  Synthetic polynucleotide

SEQ ID NO: 2676 - DNA, 198 bp, Artificial Sequence
  Synthetic polynucleotide
atcatctcaccttgcctcctgactacgtcctgacattccctgcaggtctcacacctctgaggtgtgaaaagatctcacacctctgaggtgtgaaatcgtctcacacctctgaggtgtgaaagactctcacacctctgaggtgtgaaactatctcacacctctgaggtgtgaaaggcgcgccatgcttcatcagactct

SEQ ID NO: 2677 - DNA, 198 bp, Artificial Sequence; identical to SEQ ID NO: 2676
  Synthetic polynucleotide

SEQ ID NO: 2678 - DNA, 191 bp, Artificial Sequence
  Synthetic polynucleotide
atcatctcaccttgcctcctgctcgacgcgtcacgatacctgcaggttcagcaccacggagagcgccagattcagcaccacggagagcgcctcgttcagcaccacggagagcgccgacttcagcaccacggagagcgccctattcagcaccacggagagcgccactggcgcgccatgcttcatcagactct

SEQ ID NO: 2679 - DNA, 191 bp, Artificial Sequence; identical to SEQ ID NO: 2678
  Synthetic polynucleotide

SEQ ID NO: 2680 - DNA, 197 bp, Artificial Sequence
  Synthetic polynucleotide
atcatctcaccttgcctcctgtaccgctacgatgaacccctgcaggttcgaaccgttcgaaagattcgaaccgttcgaatcgttcgaaccgttcgaagacttcgaaccgttcgaactattcgaaccgttcgaaactttcgaaccgttcgaatgcttcgaaccgttcgaagtaggcgcgccatgcttcatcagactct

SEQ ID NO: 2681 - DNA, 197 bp, Artificial Sequence; identical to SEQ ID NO: 2680
  Synthetic polynucleotide

SEQ ID NO: 2682 - DNA, 156 bp, Artificial Sequence
  Synthetic polynucleotide
atcatctcaccttgcctcctggatacaaagtaccagctcctgcaggccttatcaagaccttatcatcgccttatcagacccttatcactaccttatcaactccttatcatgcccttatcagtaccttatcaggcgcgccatgcttcatcagactct

SEQ ID NO: 2683 - DNA, 156 bp, Artificial Sequence; identical to SEQ ID NO: 2682
  Synthetic polynucleotide

SEQ ID NO: 2684 - DNA, 172 bp, Artificial Sequence
  Synthetic polynucleotide
atcatctcaccttgcctcctggtgccttacctaaagttcctgcaggtgcgggggcgagatgcgggggcgtcgtgcgggggcggactgcgggggcgctatgcgggggcgacttgcgggggcgtgctgcgggggcggtatgcgggggcgggcgcgccatgcttcatcagactct

SEQ ID NO: 2685 - DNA, 172 bp, Artificial Sequence; identical to SEQ ID NO: 2684
  Synthetic polynucleotide

SEQ ID NO: 2686 - DNA, 191 bp, Artificial Sequence
  Synthetic polynucleotide
atcatctcaccttgcctcctggtctcctgtattgcggtcctgcaggatagttaatccccctcaagaatagttaatccccctcatcgatagttaatccccctcagacatagttaatccccctcactaatagttaatccccctcaactatagttaatccccctcatgcggcgcgccatgcttcatcagactct

SEQ ID NO: 2687 - DNA, 191 bp, Artificial Sequence; identical to SEQ ID NO: 2686
  Synthetic polynucleotide

SEQ ID NO: 2688 - DNA, 188 bp, Artificial Sequence
  Synthetic polynucleotide
atcatctcaccttgcctcctgacactatccgtctttgtcctgcaggccgcggacgttgagaccgcggacgttgtcgccgcggacgttggacccgcggacgttgctaccgcggacgttgactccgcggacgttgtgcccgcggacgttggtaccgcggacgttgggcgcgccatgcttcatcagactct

SEQ ID NO: 2689 - DNA, 188 bp, Artificial Sequence; identical to SEQ ID NO: 2688
  Synthetic polynucleotide

SEQ ID NO: 2690 - DNA, 197 bp, Artificial Sequence
  Synthetic polynucleotide
atcatctcaccttgcctcctggatcctgagatcccggacctgcaggaggtcaccgtgacctagaaggtcaccgtgaccttcgaggtcaccgtgacctgacaggtcaccgtgacctctaaggtcaccgtgacctactaggtcaccgtgaccttgcaggtcaccgtgacctgtaggcgcgccatgcttcatcagactct

SEQ ID NO: 2691 - DNA, 197 bp, Artificial Sequence; identical to SEQ ID NO: 2690
  Synthetic polynucleotide

SEQ ID NO: 2692 - DNA, 172 bp, Artificial Sequence
  Synthetic polynucleotide
atcatctcaccttgcctcctgtctcggtatcgttaagtcctgcaggggagggggaaagaggagggggaatcgggagggggaagacggagggggaactaggagggggaaactggagggggaatgcggagggggaagtaggagggggaaggcgcgccatgcttcatcagactct

SEQ ID NO: 2693 - DNA, 172 bp, Artificial Sequence; identical to SEQ ID NO: 2692
  Synthetic polynucleotide

SEQ ID NO: 2694 - DNA, 191 bp, Artificial Sequence
  Synthetic polynucleotide
atcatctcaccttgcctcctggaaggcctgcacagttccctgcaggcacttccggcggaagtgagacacttccggcggaagtgtcgcacttccggcggaagtggaccacttccggcggaagtgctacacttccggcggaagtgactcacttccggcggaagtgtgcggcgcgccatgcttcatcagactct

SEQ ID NO: 2695 - DNA, 191 bp, Artificial Sequence; identical to SEQ ID NO: 2694
  Synthetic polynucleotide

SEQ ID NO: 2696 - DNA, 188 bp, Artificial Sequence
  Synthetic polynucleotide
atcatctcaccttgcctcctgttagcggcatctggttacctgcaggcagtgtggtcgcagacagtgtggtcgctcgcagtgtggtcgcgaccagtgtggtcgcctacagtgtggtcgcactcagtgtggtcgctgccagtgtggtcgcgtacagtgtggtcgcggcgcgccatgcttcatcagactct

SEQ ID NO: 2697 - DNA, 188 bp, Artificial Sequence; identical to SEQ ID NO: 2696
  Synthetic polynucleotide

SEQ ID NO: 2698 - DNA, 180 bp, Artificial Sequence
  Synthetic polynucleotide
atcatctcaccttgcctcctgcgaatatgttgcatgcacctgcaggaatttgctgacagaaatttgctgactcgaatttgctgacgacaatttgctgacctaaatttgctgacactaatttgctgactgcaatttgctgacgtaaatttgctgacggcgcgccatgcttcatcagactct

SEQ ID NO: 2699 - DNA, 180 bp, Artificial Sequence; identical to SEQ ID NO: 2698
  Synthetic polynucleotide

SEQ ID NO: 2700 - DNA, 197 bp, Artificial Sequence
  Synthetic polynucleotide
atcatctcaccttgcctcctgctagggtaccttctcggcctgcaggaaggatgagtcaccgagaaaggatgagtcaccgtcgaaggatgagtcaccggacaaggatgagtcaccgctaaaggatgagtcaccgactaaggatgagtcaccgtgcaaggatgagtcaccggtaggcgcgccatgcttcatcagactct

SEQ ID NO: 2701 - DNA, 197 bp, Artificial Sequence; identical to SEQ ID NO: 2700
  Synthetic polynucleotide

SEQ ID NO: 2702 - DNA, 191 bp, Artificial Sequence
  Synthetic polynucleotide
atcatctcaccttgcctcctgatctgtcctagctgatgcctgcaggcttcaggggtcaattgaagacttcaggggtcaattgatcgcttcaggggtcaattgagaccttcaggggtcaattgactacttcaggggtcaattgaactcttcaggggtcaattgatgcggcgcgccatgcttcatcagactct

SEQ ID NO: 2703 - DNA, 191 bp, Artificial Sequence; identical to SEQ ID NO: 2702
  Synthetic polynucleotide

SEQ ID NO: 2704 - DNA, 188 bp, Artificial Sequence
  Synthetic polynucleotide
atcatctcaccttgcctcctgtttagagaagcgaaggtcctgcaggtataatcgttttagatataatcgtttttcgtataatcgttttgactataatcgttttctatataatcgttttacttataatcgtttttgctataatcgttttgtatataatcgttttggcgcgccatgcttcatcagactct

SEQ ID NO: 2705 - DNA, 188 bp, Artificial Sequence; identical to SEQ ID NO: 2704
  Synthetic polynucleotide

SEQ ID NO: 2706 - DNA, 200 bp, Artificial Sequence
  Synthetic polynucleotide
atcatctcaccttgcctcctgtcacttgatagcggtagcctgcagggggggccccaggcctcggcagagggggccccaggcctcggctcggggggccccaggcctcggcgacgggggccccaggcctcggcctagggggccccaggcctcggcactgggggccccaggcctcggcggcgcgccatgcttcatcagactct

SEQ ID NO: 2707 - DNA, 200 bp, Artificial Sequence; identical to SEQ ID NO: 2706
  Synthetic polynucleotide

SEQ ID NO: 2708 - DNA, 190 bp, Artificial Sequence
  Synthetic polynucleotide
atcatctcaccttgcctcctgtgtactctgcgcctggtcctgcaggacgaccccccacagagaacgaccccccacagtcgacgaccccccacaggacacgaccccccacagctaacgaccccccacagactacgaccccccacagtgcacgaccccccacaggtaggcgcgccatgcttcatcagactct

SEQ ID NO: 2709 - DNA, 190 bp, Artificial Sequence; identical to SEQ ID NO: 2708
  Synthetic polynucleotide

SEQ ID NO: 2710 - DNA, 164 bp, Artificial Sequence
  Synthetic polynucleotide
atcatctcaccttgcctcctggttagcattcaattccgcctgcagggtaattaatagagtaattaattcggtaattaatgacgtaattaatctagtaattaatactgtaattaattgcgtaattaatgtagtaattaatggcgcgccatgcttcatcagactct

SEQ ID NO: 2711 - DNA, 164 bp, Artificial Sequence; identical to SEQ ID NO: 2710
  Synthetic polynucleotide

SEQ ID NO: 2712 - DNA, 188 bp, Artificial Sequence
  Synthetic polynucleotide
atcatctcaccttgcctcctggatttaaagccgctattcctgcaggcgggtggggattagacgggtggggatttcgcgggtggggattgaccgggtggggattctacgggtggggattactcgggtggggatttgccgggtggggattgtacgggtggggattggcgcgccatgcttcatcagactct

SEQ ID NO: 2713 - DNA, 188 bp, Artificial Sequence; identical to SEQ ID NO: 2712
  Synthetic polynucleotide

SEQ ID NO: 2714 - DNA, 197 bp, Artificial Sequence
  Synthetic polynucleotide
atcatctcaccttgcctcctggtgacctctatattcctcctgcagggcaaagtaaacagagagagcaaagtaaacagagtcggcaaagtaaacagaggacgcaaagtaaacagagctagcaaagtaaacagagactgcaaagtaaacagagtgcgcaaagtaaacagaggtaggcgcgccatgcttcatcagactct

SEQ ID NO: 2715 - DNA, 197 bp, Artificial Sequence; identical to SEQ ID NO: 2714
  Synthetic polynucleotide

SEQ ID NO: 2716 - DNA, 180 bp, Artificial Sequence
  Synthetic polynucleotide
atcatctcaccttgcctcctgccatgctatgagaaagacctgcaggccggaagtggcagaccggaagtggctcgccggaagtggcgacccggaagtggcctaccggaagtggcactccggaagtggctgcccggaagtggcgtaccggaagtggcggcgcgccatgcttcatcagactct

SEQ ID NO: 2717 - DNA, 180 bp, Artificial Sequence; identical to SEQ ID NO: 2716
  Synthetic polynucleotide

SEQ ID NO: 2718 - DNA, 197 bp, Artificial Sequence
  Synthetic polynucleotide
atcatctcaccttgcctcctgcaattccataaagaggccctgcaggaaggtgacgtcatcaagaaaggtgacgtcatcatcgaaggtgacgtcatcagacaaggtgacgtcatcactaaaggtgacgtcatcaactaaggtgacgtcatcatgcaaggtgacgtcatcagtaggcgcgccatgcttcatcagactct

SEQ ID NO: 2719 - DNA, 197 bp, Artificial Sequence; identical to SEQ ID NO: 2718
  Synthetic polynucleotide

SEQ ID NO: 2720 - DNA, 197 bp, Artificial Sequence
  Synthetic polynucleotide
atcatctcaccttgcctcctgatgttaataccagggagcctgcaggtttttttcttttcttagatttttttcttttctttcgtttttttcttttcttgactttttttcttttcttctatttttttcttttcttacttttttttcttttctttgctttttttcttttcttgtaggcgcgccatgcttcatcagactct

SEQ ID NO: 2721 - DNA, 197 bp, Artificial Sequence; identical to SEQ ID NO: 2720
  Synthetic polynucleotide

SEQ ID NO: 2722 - DNA, 172 bp, Artificial Sequence
  Synthetic polynucleotide
atcatctcaccttgcctcctgtcatcggatcgtaccaacctgcaggactgacctcgagaactgacctcgtcgactgacctcggacactgacctcgctaactgacctcgactactgacctcgtgcactgacctcggtaactgacctcgggcgcgccatgcttcatcagactct

SEQ ID NO: 2723 - DNA, 172 bp, Artificial Sequence; identical to SEQ ID NO: 2722
  Synthetic polynucleotide

SEQ ID NO: 2724 - DNA, 197 bp, Artificial Sequence
  Synthetic polynucleotide
atcatctcaccttgcctcctgtcagtagatttgcacgacctgcaggaacaaaatggcggccagaaacaaaatggcggcctcgaacaaaatggcggccgacaacaaaatggcggccctaaacaaaatggcggccactaacaaaatggcggcctgcaacaaaatggcggccgtaggcgcgccatgcttcatcagactct

SEQ ID NO: 2725 - DNA, 197 bp, Artificial Sequence; identical to SEQ ID NO: 2724
  Synthetic polynucleotide

SEQ ID NO: 2726 - DNA, 190 bp, Artificial Sequence
  Synthetic polynucleotide
atcatctcaccttgcctcctgattccataatcttcgaccctgcaggcactcactccctgtagacactcactccctgttcgcactcactccctgtgaccactcactccctgtctacactcactccctgtactcactcactccctgttgccactcactccctgtgtaggcgcgccatgcttcatcagactct

SEQ ID NO: 2727 - DNA, 190 bp, Artificial Sequence; identical to SEQ ID NO: 2726
  Synthetic polynucleotide

SEQ ID NO: 2728 - DNA, 172 bp, Artificial Sequence
  Synthetic polynucleotide
atcatctcaccttgcctcctgcgtagattgttcacgatcctgcaggtttcaagtggagatttcaagtggtcgtttcaagtgggactttcaagtggctatttcaagtggacttttcaagtggtgctttcaagtgggtatttcaagtggggcgcgccatgcttcatcagactct

SEQ ID NO: 2729 - DNA, 172 bp, Artificial Sequence; identical to SEQ ID NO: 2728
  Synthetic polynucleotide

SEQ ID NO: 2730 - DNA, 191 bp, Artificial Sequence
  Synthetic polynucleotide
atcatctcaccttgcctcctggacgatcaagattccgtcctgcaggtattgttaattaattcgagatattgttaattaattcgtcgtattgttaattaattcggactattgttaattaattcgctatattgttaattaattcgacttattgttaattaattcgtgcggcgcgccatgcttcatcagactct

SEQ ID NO: 2731 - DNA, 191 bp, Artificial Sequence; identical to SEQ ID NO: 2730
  Synthetic polynucleotide

SEQ ID NO: 2732 - DNA, 196 bp, Artificial Sequence
  Synthetic polynucleotide
atcatctcaccttgcctcctgctgatattcgacaccaacctgcaggctcgacctaattaagactcgacctaattatcgctcgacctaattagacctcgacctaattactactcgacctaattaactctcgacctaattatgcctcgacctaattagtactcgacctaattaggcgcgccatgcttcatcagactct

SEQ ID NO: 2733 - DNA, 196 bp, Artificial Sequence; identical to SEQ ID NO: 2732
  Synthetic polynucleotide

SEQ ID NO: 2734 - DNA, 164 bp, Artificial Sequence
  Synthetic polynucleotide
atcatctcaccttgcctcctgaaacgctggcgcgcattcctgcaggtccacttaaagatccacttaatcgtccacttaagactccacttaactatccacttaaacttccacttaatgctccacttaagtatccacttaaggcgcgccatgcttcatcagactct

SEQ ID NO: 2735 - DNA, 164 bp, Artificial Sequence; identical to SEQ ID NO: 2734
  Synthetic polynucleotide

SEQ ID NO: 2736 - DNA, 156 bp, Artificial Sequence
  Synthetic polynucleotide
atcatctcaccttgcctcctgccataccgcatgactcgcctgcaggccggaagtagaccggaagttcgccggaagtgacccggaagtctaccggaagtactccggaagttgcccggaagtgtaccggaagtggcgcgccatgcttcatcagactct

SEQ ID NO: 2737 - DNA, 156 bp, Artificial Sequence; identical to SEQ ID NO: 2736
  Synthetic polynucleotide

SEQ ID NO: 2738 - DNA, 180 bp, Artificial Sequence
  Synthetic polynucleotide
atcatctcaccttgcctcctgtctcgacatatggtcgccctgcaggtgggtggggccagatgggtggggcctcgtgggtggggccgactgggtggggccctatgggtggggccacttgggtggggcctgctgggtggggccgtatgggtggggccggcgcgccatgcttcatcagactct

SEQ ID NO: 2739 - DNA, 180 bp, Artificial Sequence; identical to SEQ ID NO: 2738
  Synthetic polynucleotide

SEQ ID NO: 2740 - DNA, 190 bp, Artificial Sequence
  Synthetic polynucleotide
atcatctcaccttgcctcctgtctccaggatcctcctacctgcaggttaatgatgattagagattaatgatgattagtcgttaatgatgattaggacttaatgatgattagctattaatgatgattagactttaatgatgattagtgcttaatgatgattaggtaggcgcgccatgcttcatcagactct

SEQ ID NO: 2741 - DNA, 190 bp, Artificial Sequence; identical to SEQ ID NO: 2740
  Synthetic polynucleotide

SEQ ID NO: 2742 - DNA, 196 bp, Artificial Sequence
  Synthetic polynucleotide
atcatctcaccttgcctcctggagaggacgcggttatgcctgcaggaaaaaataaacaaagaaaaaaataaacaatcgaaaaaataaacaagacaaaaaataaacaactaaaaaaataaacaaactaaaaaataaacaatgcaaaaaataaacaagtaaaaaaataaacaaggcgcgccatgcttcatcagactct

SEQ ID NO: 2743 - DNA, 196 bp, Artificial Sequence; identical to SEQ ID NO: 2742
  Synthetic polynucleotide

SEQ ID NO: 2744 - DNA, 191 bp, Artificial Sequence
  Synthetic polynucleotide
atcatctcaccttgcctcctggcgcggagctattacaacctgcagggttttgcacacggcactagagttttgcacacggcacttcggttttgcacacggcactgacgttttgcacacggcactctagttttgcacacggcactactgttttgcacacggcacttgcggcgcgccatgcttcatcagactct

SEQ ID NO: 2745 - DNA, 191 bp, Artificial Sequence; identical to SEQ ID NO: 2744
  Synthetic polynucleotide

SEQ ID NO: 2746 - DNA, 172 bp, Artificial Sequence
  Synthetic polynucleotide
atcatctcaccttgcctcctggagggatttagagaattcctgcaggactgacctctagaactgacctcttcgactgacctctgacactgacctctctaactgacctctactactgacctcttgcactgacctctgtaactgacctctggcgcgccatgcttcatcagactct

SEQ ID NO: 2747 - DNA, 172 bp, Artificial Sequence; identical to SEQ ID NO: 2746
  Synthetic polynucleotide

SEQ ID NO: 2748 - DNA, 156 bp, Artificial Sequence
  Synthetic polynucleotide
atcatctcaccttgcctcctgctaaagaccaggctaggcctgcaggtttttattagatttttatttcgtttttattgactttttattctatttttattacttttttatttgctttttattgtatttttattggcgcgccatgcttcatcagactct

SEQ ID NO: 2749 - DNA, 156 bp, Artificial Sequence; identical to SEQ ID NO: 2748
  Synthetic polynucleotide

SEQ ID NO: 2750 - DNA, 186 bp, Artificial Sequence
  Synthetic polynucleotide
atcatctcaccttgcctcctggggcaacgtataaggcacctgcaggccggacatgcccgggcatgtagaccggacatgcccgggcatgttcgccggacatgcccgggcatgtgacccggacatgcccgggcatgtctaccggacatgcccgggcatgtactggcgcgccatgcttcatcagactct

SEQ ID NO: 2751 - DNA, 186 bp, Artificial Sequence; identical to SEQ ID NO: 2750
  Synthetic polynucleotide

SEQ ID NO: 2752 - DNA, 185 bp, Artificial Sequence
  Synthetic polynucleotide
atcatctcaccttgcctcctgttcccgccttatgtaaccctgcaggatgttttacgactttaagaatgttttacgactttatcgatgttttacgactttagacatgttttacgactttactaatgttttacgactttaactatgttttacgactttatgcggcgcgccatgcttcatcagactct

SEQ ID NO: 2753 - DNA, 185 bp, Artificial Sequence; identical to SEQ ID NO: 2752
  Synthetic polynucleotide

SEQ ID NO: 2754 - DNA, 197 bp, Artificial Sequence
  Synthetic polynucleotide
atcatctcaccttgcctcctggatgctcggttgacgaccctgcaggcgtatcgaaaccaaaagacgtatcgaaaccaaatcgcgtatcgaaaccaaagaccgtatcgaaaccaaactacgtatcgaaaccaaaactcgtatcgaaaccaaatgccgtatcgaaaccaaagtaggcgcgccatgcttcatcagactct

SEQ ID NO: 2755 - DNA, 197 bp, Artificial Sequence; identical to SEQ ID NO: 2754
  Synthetic polynucleotide

SEQ ID NO: 2756 - DNA, 190 bp, Artificial Sequence
  Synthetic polynucleotide
atcatctcaccttgcctcctgaggattgaaagtggatacctgcaggtgacctttgacctcagatgacctttgacctctcgtgacctttgacctcgactgacctttgacctcctatgacctttgacctcacttgacctttgacctctgctgacctttgacctcgtaggcgcgccatgcttcatcagactct

SEQ ID NO: 2757 - DNA, 190 bp, Artificial Sequence; identical to SEQ ID NO: 2756
  Synthetic polynucleotide

SEQ ID NO: 2758 - DNA, 197 bp, Artificial Sequence
  Synthetic polynucleotide
atcatctcaccttgcctcctgccatatgcgcaggaaaccctgcaggggcgccccctggtggccaagaggcgccccctggtggccatcgggcgccccctggtggccagacggcgccccctggtggccactaggcgccccctggtggccaactggcgccccctggtggccatgcggcgcgccatgcttcatcagactct

SEQ ID NO: 2759 - DNA, 197 bp, Artificial Sequence; identical to SEQ ID NO: 2758
  Synthetic polynucleotide

SEQ ID NO: 2760 - DNA, 140 bp, Artificial Sequence
  Synthetic polynucleotide
atcatctcaccttgcctcctgcgccgaataccagtagacctgcaggcacgcaagacacgcatcgcacgcagaccacgcactacacgcaactcacgcatgccacgcagtacacgcaggcgcgccatgcttcatcagactct

SEQ ID NO: 2761 - DNA, 140 bp, Artificial Sequence; identical to SEQ ID NO: 2760
  Synthetic polynucleotide

SEQ ID NO: 2762 - DNA, 190 bp, Artificial Sequence
  Synthetic polynucleotide
atcatctcaccttgcctcctgatcccttctcaactatgcctgcaggtcactttcactttcagatcactttcactttctcgtcactttcactttcgactcactttcactttcctatcactttcactttcacttcactttcactttctgctcactttcactttcgtaggcgcgccatgcttcatcagactct

SEQ ID NO: 2763 - DNA, 190 bp, Artificial Sequence; identical to SEQ ID NO: 2762
  Synthetic polynucleotide

SEQ ID NO: 2764 - DNA, 172 bp, Artificial Sequence
  Synthetic polynucleotide
atcatctcaccttgcctcctgtactggaacaacggtaccctgcaggggtaattagcagaggtaattagctcgggtaattagcgacggtaattagcctaggtaattagcactggtaattagctgcggtaattagcgtaggtaattagcggcgcgccatgcttcatcagactct

SEQ ID NO: 2765 - DNA, 172 bp, Artificial Sequence; identical to SEQ ID NO: 2764
  Synthetic polynucleotide

SEQ ID NO: 2766 - DNA, 180 bp, Artificial Sequence
  Synthetic polynucleotide
atcatctcaccttgcctcctgaaactgaccacgcgcgacctgcaggtctgtggtttgagatctgtggtttgtcgtctgtggtttggactctgtggtttgctatctgtggtttgacttctgtggtttgtgctctgtggtttggtatctgtggtttgggcgcgccatgcttcatcagactct

SEQ ID NO: 2767 - DNA, 180 bp, Artificial Sequence; identical to SEQ ID NO: 2766
  Synthetic polynucleotide

SEQ ID NO: 2768 - DNA, 190 bp, Artificial Sequence
  Synthetic polynucleotide
atcatctcaccttgcctcctgtcattagcaactaccgccctgcaggggtattgcacaatcagaggtattgcacaatctcgggtattgcacaatcgacggtattgcacaatcctaggtattgcacaatcactggtattgcacaatctgcggtattgcacaatcgtaggcgcgccatgcttcatcagactct

SEQ ID NO: 2769 - DNA, 190 bp, Artificial Sequence; identical to SEQ ID NO: 2768
  Synthetic polynucleotide

SEQ ID NO: 2770 - DNA, 190 bp, Artificial Sequence
  Synthetic polynucleotide
atcatctcaccttgcctcctggatcaagcttgtgtgtccctgcaggctccctgtcccctcagactccctgtcccctctcgctccctgtcccctcgacctccctgtcccctcctactccctgtcccctcactctccctgtcccctctgcctccctgtcccctcgtaggcgcgccatgcttcatcagactct

SEQ ID NO: 2771 - DNA, 190 bp, Artificial Sequence; identical to SEQ ID NO: 2770
  Synthetic polynucleotide

SEQ ID NO: 2772 - DNA, 188 bp, Artificial Sequence
  Synthetic polynucleotide
atcatctcaccttgcctcctgggataatgccattcctgcctgcaggaattttccattgagaaattttccattgtcgaattttccattggacaattttccattgctaaattttccattgactaattttccattgtgcaattttccattggtaaattttccattgggcgcgccatgcttcatcagactct

SEQ ID NO: 2773 - DNA, 188 bp, Artificial Sequence; identical to SEQ ID NO: 2772
  Synthetic polynucleotide

SEQ ID NO: 2774 - DNA, 172 bp, Artificial Sequence
  Synthetic polynucleotide
atcatctcaccttgcctcctgtctacatcacaatcttgcctgcaggcacagcggggagacacagcggggtcgcacagcgggggaccacagcggggctacacagcggggactcacagcggggtgccacagcgggggtacacagcggggggcgcgccatgcttcatcagactct

SEQ ID NO: 2775 - DNA, 172 bp, Artificial Sequence; identical to SEQ ID NO: 2774
  Synthetic polynucleotide

SEQ ID NO: 2776 - DNA, 197 bp, Artificial Sequence
  Synthetic polynucleotide
atcatctcaccttgcctcctgtcgtctactttcgccgacctgcaggaggtcaaggtcacccagaaggtcaaggtcaccctcgaggtcaaggtcacccgacaggtcaaggtcacccctaaggtcaaggtcacccactaggtcaaggtcaccctgcaggtcaaggtcacccgtaggcgcgccatgcttcatcagactct

SEQ ID NO: 2777 - DNA, 197 bp, Artificial Sequence; identical to SEQ ID NO: 2776
  Synthetic polynucleotide

SEQ ID NO: 2778 - DNA, 172 bp, Artificial Sequence
  Synthetic polynucleotide
atcatctcaccttgcctcctgctttggtgaacgaataccctgcaggggtaattaggagaggtaattaggtcgggtaattagggacggtaattaggctaggtaattaggactggtaattaggtgcggtaattagggtaggtaattaggggcgcgccatgcttcatcagactct

SEQ ID NO: 2779 - DNA, 172 bp, Artificial Sequence; identical to SEQ ID NO: 2778
  Synthetic polynucleotide

SEQ ID NO: 2780 - DNA, 191 bp, Artificial Sequence
  Synthetic polynucleotide
atcatctcaccttgcctcctgattcgacgcgcaattcacctgcaggccttagttaactaaaatagaccttagttaactaaaattcgccttagttaactaaaatgacccttagttaactaaaatctaccttagttaactaaaatactccttagttaactaaaattgcggcgcgccatgcttcatcagactct

SEQ ID NO: 2781 - DNA, 191 bp, Artificial Sequence; identical to SEQ ID NO: 2780
  Synthetic polynucleotide

SEQ ID NO: 2782 - DNA, 197 bp, Artificial Sequence
  Synthetic polynucleotide
atcatctcaccttgcctcctggcggttatattaagagccctgcaggtaggaaatcgaaagttggagataggaaatcgaaagttggtcgtaggaaatcgaaagttgggactaggaaatcgaaagttggctataggaaatcgaaagttggacttaggaaatcgaaagttggtgcggcgcgccatgcttcatcagactct

SEQ ID NO: 2783 - DNA, 197 bp, Artificial Sequence; identical to SEQ ID NO: 2782
  Synthetic polynucleotide

SEQ ID NO: 2784 - DNA, 148 bp, Artificial Sequence
  Synthetic polynucleotide
atcatctcaccttgcctcctgccagggactccctcatacctgcagggtgacctagagtgaccttcggtgacctgacgtgacctctagtgacctactgtgaccttgcgtgacctgtagtgacctggcgcgccatgcttcatcagactct

SEQ ID NO: 2785 - DNA, 148 bp, Artificial Sequence; identical to SEQ ID NO: 2784
  Synthetic polynucleotide

SEQ ID NO: 2786 - DNA, 172 bp, Artificial Sequence
  Synthetic polynucleotide
atcatctcaccttgcctcctgtgtcaatgatcaggctccctgcaggggtaattagtagaggtaattagttcgggtaattagtgacggtaattagtctaggtaattagtactggtaattagttgcggtaattagtgtaggtaattagtggcgcgccatgcttcatcagactct

SEQ ID NO: 2787 - DNA, 172 bp, Artificial Sequence; identical to SEQ ID NO: 2786
  Synthetic polynucleotide

SEQ ID NO: 2788 - DNA, 188 bp, Artificial Sequence
  Synthetic polynucleotide
atcatctcaccttgcctcctgtagagcgtctagaacgccctgcagggcacttcctgggagagcacttcctgggtcggcacttcctggggacgcacttcctgggctagcacttcctgggactgcacttcctgggtgcgcacttcctggggtagcacttcctgggggcgcgccatgcttcatcagactct

SEQ ID NO: 2789 - DNA, 188 bp, Artificial Sequence; identical to SEQ ID NO: 2788
  Synthetic polynucleotide

SEQ ID NO: 2790 - DNA, 185 bp, Artificial Sequence
  Synthetic polynucleotide
atcatctcaccttgcctcctggtcgaacgtggtttgatcctgcaggaattccattgttcaatagaaattccattgttcaattcgaattccattgttcaatgacaattccattgttcaatctaaattccattgttcaatactaattccattgttcaattgcggcgcgccatgcttcatcagactct

SEQ ID NO: 2791 - DNA, 185 bp, Artificial Sequence; identical to SEQ ID NO: 2790
  Synthetic polynucleotide

SEQ ID NO: 2792 - DNA, 185 bp, Artificial Sequence
  Synthetic polynucleotide
atcatctcaccttgcctcctgcgttcgattagtcgattcctgcaggatcagctaattaacctagaatcagctaattaaccttcgatcagctaattaacctgacatcagctaattaacctctaatcagctaattaacctactatcagctaattaaccttgcggcgcgccatgcttcatcagactct

SEQ ID NO: 2793 - DNA, 185 bp, Artificial Sequence; identical to SEQ ID NO: 2792
  Synthetic polynucleotide

SEQ ID NO: 2794 - DNA, 196 bp, Artificial Sequence
  Synthetic polynucleotide
atcatctcaccttgcctcctgctgagaattgtcatatgcctgcaggagtttctatttttagtaacagtagaagtttctatttttagtaacagttcgagtttctatttttagtaacagtgacagtttctatttttagtaacagtctaagtttctatttttagtaacagtactggcgcgccatgcttcatcagactct

SEQ ID NO: 2795 - DNA, 196 bp, Artificial Sequence; identical to SEQ ID NO: 2794
  Synthetic polynucleotide

SEQ ID NO: 2796 - DNA, 191 bp, Artificial Sequence
  Synthetic polynucleotide
atcatctcaccttgcctcctgagccgaaacctcaatcacctgcaggtttcagtttcgctttccagatttcagtttcgctttcctcgtttcagtttcgctttccgactttcagtttcgctttccctatttcagtttcgctttccacttttcagtttcgctttcctgcggcgcgccatgcttcatcagactct

SEQ ID NO: 2797 - DNA, 191 bp, Artificial Sequence; identical to SEQ ID NO: 2796
  Synthetic polynucleotide

SEQ ID NO: 2798 - DNA, 164 bp, Artificial Sequence
  Synthetic polynucleotide
atcatctcaccttgcctcctgcgtagatcagagcctagcctgcaggatgtcaattagaatgtcaatttcgatgtcaattgacatgtcaattctaatgtcaattactatgtcaatttgcatgtcaattgtaatgtcaattggcgcgccatgcttcatcagactct

SEQ ID NO: 2799 - DNA, 164 bp, Artificial Sequence; identical to SEQ ID NO: 2798
  Synthetic polynucleotide

SEQ ID NO: 2800 - DNA, 185 bp, Artificial Sequence
  Synthetic polynucleotide
atcatctcaccttgcctcctgcacggtgtccgttaggtcctgcaggctgtccatggtgctgaagactgtccatggtgctgatcgctgtccatggtgctgagacctgtccatggtgctgactactgtccatggtgctgaactctgtccatggtgctgatgcggcgcgccatgcttcatcagactct

SEQ ID NO: 2801 - DNA, 185 bp, Artificial Sequence; identical to SEQ ID NO: 2800
  Synthetic polynucleotide

SEQ ID NO: 2802 - DNA, 198 bp, Artificial Sequence
  Synthetic polynucleotide
atcatctcaccttgcctcctgtcccacttcacagaatacctgcaggttgcccgcacccaagatggcggcagattgcccgcacccaagatggcggctcgttgcccgcacccaagatggcggcgacttgcccgcacccaagatggcggcctattgcccgcacccaagatggcggcggcgcgccatgcttcatcagactct

SEQ ID NO: 2803 - DNA, 198 bp, Artificial Sequence; identical to SEQ ID NO: 2802
  Synthetic polynucleotide

SEQ ID NO: 2804 - DNA, 172 bp, Artificial Sequence
  Synthetic polynucleotide
atcatctcaccttgcctcctgaatgaaattcctcagtccctgcaggtttttattggagatttttattggtcgtttttattgggactttttattggctatttttattggacttttttattggtgctttttattgggtatttttattggggcgcgccatgcttcatcagactct

SEQ ID NO: 2805 - DNA, 172 bp, Artificial Sequence; identical to SEQ ID NO: 2804
  Synthetic polynucleotide

SEQ ID NO: 2806 - DNA, 196 bp, Artificial Sequence
  Synthetic polynucleotide
atcatctcaccttgcctcctgtgcctcgggtacgatctcctgcaggatggggcgcagctgcgcccctcagaatggggcgcagctgcgcccctctcgatggggcgcagctgcgcccctcgacatggggcgcagctgcgcccctcctaatggggcgcagctgcgcccctcactggcgcgccatgcttcatcagactct

SEQ ID NO: 2807 - DNA, 196 bp, Artificial Sequence; identical to SEQ ID NO: 2806
  Synthetic polynucleotide

SEQ ID NO: 2808 - DNA, 164 bp, Artificial Sequence
  Synthetic polynucleotide
atcatctcaccttgcctcctgatgtacccaagcggctgcctgcaggcccaccctcagacccaccctctcgcccaccctcgaccccaccctcctacccaccctcactcccaccctctgccccaccctcgtacccaccctcggcgcgccatgcttcatcagactct

SEQ ID NO: 2809 - DNA, 164 bp, Artificial Sequence; identical to SEQ ID NO: 2808
  Synthetic polynucleotide

SEQ ID NO: 2810 - DNA, 196 bp, Artificial Sequence
  Synthetic polynucleotide
atcatctcaccttgcctcctggagatataacacctgcccctgcaggctcgtaatgaggtagactcgtaatgaggttcgctcgtaatgaggtgacctcgtaatgaggtctactcgtaatgaggtactctcgtaatgaggttgcctcgtaatgaggtgtactcgtaatgaggtggcgcgccatgcttcatcagactct

SEQ ID NO: 2811 - DNA, 196 bp, Artificial Sequence; identical to SEQ ID NO: 2810
  Synthetic polynucleotide

SEQ ID NO: 2812 - DNA, 172 bp, Artificial Sequence
  Synthetic polynucleotide
atcatctcaccttgcctcctggcggagtctagttatcacctgcaggtttttattgcagatttttattgctcgtttttattgcgactttttattgcctatttttattgcacttttttattgctgctttttattgcgtatttttattgcggcgcgccatgcttcatcagactct

SEQ ID NO: 2813 - DNA, 172 bp, Artificial Sequence; identical to SEQ ID NO: 2812
  Synthetic polynucleotide

SEQ ID NO: 2814 - DNA, 197 bp, Artificial Sequence
  Synthetic polynucleotide
atcatctcaccttgcctcctggcagtcgtactcggcaacctgcaggaggtcaccctgacctagaaggtcaccctgaccttcgaggtcaccctgacctgacaggtcaccctgacctctaaggtcaccctgacctactaggtcaccctgaccttgcaggtcaccctgacctgtaggcgcgccatgcttcatcagactct

SEQ ID NO: 2815 - DNA, 197 bp, Artificial Sequence; identical to SEQ ID NO: 2814
  Synthetic polynucleotide

SEQ ID NO: 2816 - DNA, 148 bp, Artificial Sequence
  Synthetic polynucleotide
atcatctcaccttgcctcctgtgtgccctatggcgtgacctgcaggattacaaagaattacaatcgattacaagacattacaactaattacaaactattacaatgcattacaagtaattacaaggcgcgccatgcttcatcagactct

SEQ ID NO: 2817 - DNA, 148 bp, Artificial Sequence; identical to SEQ ID NO: 2816
  Synthetic polynucleotide

SEQ ID NO: 2818 - DNA, 196 bp, Artificial Sequence
  Synthetic polynucleotide
atcatctcaccttgcctcctggtctagtaaaggttgtgcctgcaggagggggcggggccagaagggggcggggcctcgagggggcggggccgacagggggcggggccctaagggggcggggccactagggggcggggcctgcagggggcggggccgtaagggggcggggccggcgcgccatgcttcatcagactct

SEQ ID NO: 2819 - DNA, 196 bp, Artificial Sequence; identical to SEQ ID NO: 2818
  Synthetic polynucleotide

SEQ ID NO: 2820 - DNA, 197 bp, Artificial Sequence
  Synthetic polynucleotide
atcatctcaccttgcctcctgaagcgagcaggcttctccctgcaggccatacatattggtgagaccatacatattggtgtcgccatacatattggtggacccatacatattggtgctaccatacatattggtgactccatacatattggtgtgcccatacatattggtggtaggcgcgccatgcttcatcagactct

SEQ ID NO: 2821 - DNA, 197 bp, Artificial Sequence; identical to SEQ ID NO: 2820
  Synthetic polynucleotide

SEQ ID NO: 2822 - DNA, 172 bp, Artificial Sequence
  Synthetic polynucleotide
atcatctcaccttgcctcctgtgggataaagttgggcgcctgcaggttacgcccccagattacgccccctcgttacgcccccgacttacgcccccctattacgcccccactttacgccccctgcttacgcccccgtattacgcccccggcgcgccatgcttcatcagactct

SEQ ID NO: 2823 - DNA, 172 bp, Artificial Sequence; identical to SEQ ID NO: 2822
  Synthetic polynucleotide

SEQ ID NO: 2824 - DNA, 164 bp, Artificial Sequence
  Synthetic polynucleotide
atcatctcaccttgcctcctggtggctgtctggtgtaacctgcagggtatcaaatagagtatcaaattcggtatcaaatgacgtatcaaatctagtatcaaatactgtatcaaattgcgtatcaaatgtagtatcaaatggcgcgccatgcttcatcagactct

SEQ ID NO: 2825 - DNA, 164 bp, Artificial Sequence; identical to SEQ ID NO: 2824
  Synthetic polynucleotide

SEQ ID NO: 2826 - DNA, 197 bp, Artificial Sequence
  Synthetic polynucleotide
atcatctcaccttgcctcctggcctaggcaaaggcagtcctgcaggggtgggtgtggctggagaggtgggtgtggctggtcgggtgggtgtggctgggacggtgggtgtggctggctaggtgggtgtggctggactggtgggtgtggctggtgcggtgggtgtggctgggtaggcgcgccatgcttcatcagactct

SEQ ID NO: 2827 - DNA, 197 bp, Artificial Sequence; identical to SEQ ID NO: 2826
  Synthetic polynucleotide

SEQ ID NO: 2828 - DNA, 191 bp, Artificial Sequence
  Synthetic polynucleotide
atcatctcaccttgcctcctgagtgcttagttcgtgctcctgcaggcgagttaattaataagcagacgagttaattaataagctcgcgagttaattaataagcgaccgagttaattaataagcctacgagttaattaataagcactcgagttaattaataagctgcggcgcgccatgcttcatcagactct

SEQ ID NO: 2829 - DNA, 191 bp, Artificial Sequence; identical to SEQ ID NO: 2828
  Synthetic polynucleotide

SEQ ID NO: 2830 - DNA, 156 bp, Artificial Sequence
  Synthetic polynucleotide
atcatctcaccttgcctcctgtacgcagaatattctgtcctgcagggggattagagagggattagtcggggattaggacgggattagctagggattagactgggattagtgcgggattaggtagggattagggcgcgccatgcttcatcagactct

SEQ ID NO: 2831 - DNA, 156 bp, Artificial Sequence; identical to SEQ ID NO: 2830
  Synthetic polynucleotide

SEQ ID NO: 2832 - DNA, 191 bp, Artificial Sequence
  Synthetic polynucleotide
atcatctcaccttgcctcctgtccaggtatactaggcccctgcaggtatggttaattattaactgctagatatggttaattattaactgcttcgtatggttaattattaactgctgactatggttaattattaactgctctatatggttaattattaactgctactggcgcgccatgcttcatcagactct

SEQ ID NO: 2833 - DNA, 191 bp, Artificial Sequence; identical to SEQ ID NO: 2832
  Synthetic polynucleotide

SEQ ID NO: 2834 - DNA, 156 bp, Artificial Sequence
  Synthetic polynucleotide
atcatctcaccttgcctcctgagtcgaggaatttcagacctgcaggttgattagagattgattagtcgttgattaggacttgattagctattgattagactttgattagtgcttgattaggtattgattagggcgcgccatgcttcatcagactct

SEQ ID NO: 2835 - DNA, 156 bp, Artificial Sequence; identical to SEQ ID NO: 2834
  Synthetic polynucleotide

SEQ ID NO: 2836 - DNA, 188 bp, Artificial Sequence
  Synthetic polynucleotide
atcatctcaccttgcctcctgcgccggttacaacagaccctgcaggggtccttttataagaggtccttttatatcgggtccttttatagacggtccttttatactaggtccttttataactggtccttttatatgcggtccttttatagtaggtccttttataggcgcgccatgcttcatcagactct

SEQ ID NO: 2837 - DNA, 188 bp, Artificial Sequence; identical to SEQ ID NO: 2836
  Synthetic polynucleotide

SEQ ID NO: 2838 - DNA, 191 bp, Artificial Sequence
  Synthetic polynucleotide
atcatctcaccttgcctcctgaccaattatcgcagtggcctgcaggtaccactaggtggcgctagataccactaggtggcgcttcgtaccactaggtggcgctgactaccactaggtggcgctctataccactaggtggcgctacttaccactaggtggcgcttgcggcgcgccatgcttcatcagactct

SEQ ID NO: 2839 - DNA, 191 bp, Artificial Sequence; identical to SEQ ID NO: 2838
  Synthetic polynucleotide

SEQ ID NO: 2840 - DNA, 164 bp, Artificial Sequence
  Synthetic polynucleotide
atcatctcaccttgcctcctggctccacaggcggtaatcctgcagggataattagagagataattagtcggataattaggacgataattagctagataattagactgataattagtgcgataattaggtagataattagggcgcgccatgcttcatcagactct

SEQ ID NO: 2841 - DNA, 164 bp, Artificial Sequence; identical to SEQ ID NO: 2840
  Synthetic polynucleotide

SEQ ID NO: 2842 - DNA, 164 bp, Artificial Sequence
  Synthetic polynucleotide
atcatctcaccttgcctcctgttcttggtttgagtaagcctgcaggcacgtgatcagacacgtgatctcgcacgtgatcgaccacgtgatcctacacgtgatcactcacgtgatctgccacgtgatcgtacacgtgatcggcgcgccatgcttcatcagactct

SEQ ID NO: 2843 - DNA, 164 bp, Artificial Sequence; identical to SEQ ID NO: 2842
  Synthetic polynucleotide

SEQ ID NO: 2844 - DNA, 164 bp, Artificial Sequence
  Synthetic polynucleotide
atcatctcaccttgcctcctgccactaatgggactgctcctgcaggcgttaatgaagacgttaatgatcgcgttaatgagaccgttaatgactacgttaatgaactcgttaatgatgccgttaatgagtacgttaatgaggcgcgccatgcttcatcagactct

SEQ ID NO: 2845 - DNA, 164 bp, Artificial Sequence; identical to SEQ ID NO: 2844
  Synthetic polynucleotide

SEQ ID NO: 2846 - DNA, 156 bp, Artificial Sequence
  Synthetic polynucleotide
atcatctcaccttgcctcctgccggatgcaagttcttgcctgcagggggattatagagggattattcggggattatgacgggattatctagggattatactgggattattgcgggattatgtagggattatggcgcgccatgcttcatcagactct

SEQ ID NO: 2847 - DNA, 156 bp, Artificial Sequence; identical to SEQ ID NO: 2846
  Synthetic polynucleotide

SEQ ID NO: 2848 - DNA, 180 bp, Artificial Sequence
  Synthetic polynucleotide
atcatctcaccttgcctcctggcgtgtttcatccatcgcctgcaggccatatgtcacagaccatatgtcactcgccatatgtcacgacccatatgtcacctaccatatgtcacactccatatgtcactgcccatatgtcacgtaccatatgtcacggcgcgccatgcttcatcagactct

SEQ ID NO: 2849 - DNA, 180 bp, Artificial Sequence; identical to SEQ ID NO: 2848
  Synthetic polynucleotide

SEQ ID NO: 2850 - DNA, 172 bp, Artificial Sequence
  Synthetic polynucleotide
atcatctcaccttgcctcctgtttatcatgaacgaccgcctgcaggcattaatcaaagacattaatcaatcgcattaatcaagaccattaatcaactacattaatcaaactcattaatcaatgccattaatcaagtacattaatcaaggcgcgccatgcttcatcagactct

SEQ ID NO: 2851 - DNA, 172 bp, Artificial Sequence; identical to SEQ ID NO: 2850
  Synthetic polynucleotide

SEQ ID NO: 2852 - DNA, 185 bp, Artificial Sequence
  Synthetic polynucleotide
atcatctcaccttgcctcctgtgtcaaacatatggtctcctgcaggcttaagtaaacaatggagacttaagtaaacaatggtcgcttaagtaaacaatgggaccttaagtaaacaatggctacttaagtaaacaatggactcttaagtaaacaatggtgcggcgcgccatgcttcatcagactct

SEQ ID NO: 2853 - DNA, 185 bp, Artificial Sequence; identical to SEQ ID NO: 2852
  Synthetic polynucleotide

SEQ ID NO: 2854 - DNA, 185 bp, Artificial Sequence
  Synthetic polynucleotide
atcatctcaccttgcctcctgtctaacggcttgcattccctgcaggatgaatgtgcagtcatagaatgaatgtgcagtcattcgatgaatgtgcagtcatgacatgaatgtgcagtcatctaatgaatgtgcagtcatactatgaatgtgcagtcattgcggcgcgccatgcttcatcagactct

SEQ ID NO: 2855 - DNA, 185 bp, Artificial Sequence; identical to SEQ ID NO: 2854
  Synthetic polynucleotide

SEQ ID NO: 2856 - DNA, 190 bp, Artificial Sequence
  Synthetic polynucleotide
atcatctcaccttgcctcctgtaaatcctattatgccgcctgcaggtgatgacgtcaccgagatgatgacgtcaccgtcgtgatgacgtcaccggactgatgacgtcaccgctatgatgacgtcaccgacttgatgacgtcaccgtgctgatgacgtcaccggtaggcgcgccatgcttcatcagactct

SEQ ID NO: 2857 - DNA, 190 bp, Artificial Sequence; identical to SEQ ID NO: 2856
  Synthetic polynucleotide

SEQ ID NO: 2858 - DNA, 197 bp, Artificial Sequence
  Synthetic polynucleotide
atcatctcaccttgcctcctgcctagaaatgccatagacctgcaggaagaatgagtcatcaagaaagaatgagtcatcatcgaagaatgagtcatcagacaagaatgagtcatcactaaagaatgagtcatcaactaagaatgagtcatcatgcaagaatgagtcatcagtaggcgcgccatgcttcatcagactct

SEQ ID NO: 2859 - DNA, 197 bp, Artificial Sequence; identical to SEQ ID NO: 2858
  Synthetic polynucleotide

SEQ ID NO: 2860 - DNA, 156 bp, Artificial Sequence
  Synthetic polynucleotide
atcatctcaccttgcctcctgctcttatcggtaagactcctgcagggggattaaagagggattaatcggggattaagacgggattaactagggattaaactgggattaatgcgggattaagtagggattaaggcgcgccatgcttcatcagactct

SEQ ID NO: 2861 - DNA, 156 bp, Artificial Sequence; identical to SEQ ID NO: 2860
  Synthetic polynucleotide

SEQ ID NO: 2862 - DNA, 191 bp, Artificial Sequence
  Synthetic polynucleotide
atcatctcaccttgcctcctggggtatgtatacctttacctgcagggaaaactagttaacatcagagaaaactagttaacatctcggaaaactagttaacatcgacgaaaactagttaacatcctagaaaactagttaacatcactgaaaactagttaacatctgcggcgcgccatgcttcatcagactct

SEQ ID NO: 2863 - DNA, 191 bp, Artificial Sequence; identical to SEQ ID NO: 2862
  Synthetic polynucleotide

SEQ ID NO: 2864 - DNA, 196 bp, Artificial Sequence
  Synthetic polynucleotide
atcatctcaccttgcctcctgtgccactacggtttggccctgcagggcggaggccggggagagcggaggccggggtcggcggaggccgggggacgcggaggccggggctagcggaggccggggactgcggaggccggggtgcgcggaggccgggggtagcggaggccggggggcgcgccatgcttcatcagactct

SEQ ID NO: 2865 - DNA, 196 bp, Artificial Sequence; identical to SEQ ID NO: 2864
  Synthetic polynucleotide

SEQ ID NO: 2866 - DNA, 156 bp, Artificial Sequence
  Synthetic polynucleotide
atcatctcaccttgcctcctggagagcactgtcttatacctgcaggacttcctgagaacttcctgtcgacttcctggacacttcctgctaacttcctgactacttcctgtgcacttcctggtaacttcctgggcgcgccatgcttcatcagactct

SEQ ID NO: 2867 - DNA, 156 bp, Artificial Sequence; identical to SEQ ID NO: 2866
  Synthetic polynucleotide

SEQ ID NO: 2868 - DNA, 164 bp, Artificial Sequence
  Synthetic polynucleotide
atcatctcaccttgcctcctgacctttccagctccgtgcctgcaggaattttgggagaaattttgggtcgaattttggggacaattttgggctaaattttgggactaattttgggtgcaattttggggtaaattttgggggcgcgccatgcttcatcagactct

SEQ ID NO: 2869 - DNA, 164 bp, Artificial Sequence; identical to SEQ ID NO: 2868
  Synthetic polynucleotide

SEQ ID NO: 2870 - DNA, 185 bp, Artificial Sequence
  Synthetic polynucleotide
atcatctcaccttgcctcctgcactcacggaaatggtgcctgcaggtaaccgcaaaccgcaaagataaccgcaaaccgcaatcgtaaccgcaaaccgcaagactaaccgcaaaccgcaactataaccgcaaaccgcaaacttaaccgcaaaccgcaatgcggcgcgccatgcttcatcagactct

SEQ ID NO: 2871 - DNA, 185 bp, Artificial Sequence; identical to SEQ ID NO: 2870
  Synthetic polynucleotide

SEQ ID NO: 2872 - DNA, 156 bp, Artificial Sequence
  Synthetic polynucleotide
atcatctcaccttgcctcctgtgccggccctgaattagcctgcaggacttcctcagaacttcctctcgacttcctcgacacttcctcctaacttcctcactacttcctctgcacttcctcgtaacttcctcggcgcgccatgcttcatcagactct

SEQ ID NO: 2873 - DNA, 156 bp, Artificial Sequence; identical to SEQ ID NO: 2872
  Synthetic polynucleotide

SEQ ID NO: 2874 - DNA, 191 bp, Artificial Sequence
  Synthetic polynucleotide
atcatctcaccttgcctcctggcgggtcaatttagtagcctgcaggccccatttcccggaaatcaccagaccccatttcccggaaatcacctcgccccatttcccggaaatcaccgacccccatttcccggaaatcaccctaccccatttcccggaaatcaccactggcgcgccatgcttcatcagactct

SEQ ID NO: 2875 - DNA, 191 bp, Artificial Sequence; identical to SEQ ID NO: 2874
  Synthetic polynucleotide

SEQ ID NO: 2876 - DNA, 172 bp, Artificial Sequence
  Synthetic polynucleotide
atcatctcaccttgcctcctgctttggtcgccgtcagacctgcagggggaaagcccagagggaaagccctcggggaaagcccgacgggaaagcccctagggaaagcccactgggaaagccctgcgggaaagcccgtagggaaagcccggcgcgccatgcttcatcagactct

SEQ ID NO: 2877 - DNA, 172 bp, Artificial Sequence; identical to SEQ ID NO: 2876
  Synthetic polynucleotide

SEQ ID NO: 2878 - DNA, 180 bp, Artificial Sequence
  Synthetic polynucleotide
atcatctcaccttgcctcctggaacgtagctaaacgagcctgcaggggatgagtcatagaggatgagtcattcgggatgagtcatgacggatgagtcatctaggatgagtcatactggatgagtcattgcggatgagtcatgtaggatgagtcatggcgcgccatgcttcatcagactct

SEQ ID NO: 2879 - DNA, 180 bp, Artificial Sequence; identical to SEQ ID NO: 2878
  Synthetic polynucleotide

SEQ ID NO: 2880 - DNA, 196 bp, Artificial Sequence
  Synthetic polynucleotide
atcatctcaccttgcctcctgagaatctgcaaatccttcctgcaggcggtgggggggatagacggtgggggggattcgcggtgggggggatgaccggtgggggggatctacggtgggggggatactcggtgggggggattgccggtgggggggatgtacggtgggggggatggcgcgccatgcttcatcagactct

SEQ ID NO: 2881 - DNA, 196 bp, Artificial Sequence; identical to SEQ ID NO: 2880
  Synthetic polynucleotide

SEQ ID NO: 2882 - DNA, 190 bp, Artificial Sequence
  Synthetic polynucleotide
atcatctcaccttgcctcctgtaatacccaggaaacgacctgcaggaaccacaaaccccaagaaaccacaaaccccatcgaaccacaaaccccagacaaccacaaaccccactaaaccacaaaccccaactaaccacaaaccccatgcaaccacaaaccccagtaggcgcgccatgcttcatcagactct

SEQ ID NO: 2883 - DNA, 190 bp, Artificial Sequence; identical to SEQ ID NO: 2882
  Synthetic polynucleotide

SEQ ID NO: 2884 - DNA, 172 bp, Artificial Sequence
  Synthetic polynucleotide
atcatctcaccttgcctcctgaggaactgtgacctgatcctgcaggtatgacgtaaagatatgacgtaatcgtatgacgtaagactatgacgtaactatatgacgtaaacttatgacgtaatgctatgacgtaagtatatgacgtaaggcgcgccatgcttcatcagactct

SEQ ID NO: 2885 - DNA, 172 bp, Artificial Sequence; identical to SEQ ID NO: 2884
  Synthetic polynucleotide

SEQ ID NO: 2886 - DNA, 196 bp, Artificial Sequence
  Synthetic polynucleotide
atcatctcaccttgcctcctggaccaacttctatacctcctgcaggcccacgtacgcacagacccacgtacgcactcgcccacgtacgcacgaccccacgtacgcacctacccacgtacgcacactcccacgtacgcactgccccacgtacgcacgtacccacgtacgcacggcgcgccatgcttcatcagactct

SEQ ID NO: 2887 - DNA, 196 bp, Artificial Sequence; identical to SEQ ID NO: 2886
  Synthetic polynucleotide

SEQ ID NO: 2888 - DNA, 172 bp, Artificial Sequence
  Synthetic polynucleotide
atcatctcaccttgcctcctggaaacggataggtcttccctgcaggcatagcaaccagacatagcaacctcgcatagcaaccgaccatagcaaccctacatagcaaccactcatagcaacctgccatagcaaccgtacatagcaaccggcgcgccatgcttcatcagactct

SEQ ID NO: 2889 - DNA, 172 bp, Artificial Sequence; identical to SEQ ID NO: 2888
  Synthetic polynucleotide

SEQ ID NO: 2890 - DNA, 185 bp, Artificial Sequence
  Synthetic polynucleotide
atcatctcaccttgcctcctgggaaggcagtagcaggacctgcaggccgatgacgtcatcgtagaccgatgacgtcatcgttcgccgatgacgtcatcgtgacccgatgacgtcatcgtctaccgatgacgtcatcgtactccgatgacgtcatcgttgcggcgcgccatgcttcatcagactct

SEQ ID NO: 2891 - DNA, 185 bp, Artificial Sequence; identical to SEQ ID NO: 2890
  Synthetic polynucleotide

SEQ ID NO: 2892 - DNA, 156 bp, Artificial Sequence
  Synthetic polynucleotide
atcatctcaccttgcctcctgtgcacttgtgttaacgacctgcaggacccgcatagaacccgcattcgacccgcatgacacccgcatctaacccgcatactacccgcattgcacccgcatgtaacccgcatggcgcgccatgcttcatcagactct

SEQ ID NO: 2893 - DNA, 156 bp, Artificial Sequence; identical to SEQ ID NO: 2892
  Synthetic polynucleotide

SEQ ID NO: 2894 - DNA, 172 bp, Artificial Sequence
  Synthetic polynucleotide
atcatctcaccttgcctcctgcacaattggccacagcccctgcaggcacacctgcaagacacacctgcatcgcacacctgcagaccacacctgcactacacacctgcaactcacacctgcatgccacacctgcagtacacacctgcaggcgcgccatgcttcatcagactct

SEQ ID NO: 2895 - DNA, 172 bp, Artificial Sequence; identical to SEQ ID NO: 2894
  Synthetic polynucleotide

SEQ ID NO: 2896 - DNA, 164 bp, Artificial Sequence
  Synthetic polynucleotide
atcatctcaccttgcctcctggtaacgttgacgtcagacctgcaggccctatctcagaccctatctctcgccctatctcgacccctatctcctaccctatctcactccctatctctgcccctatctcgtaccctatctcggcgcgccatgcttcatcagactct

SEQ ID NO: 2897 - DNA, 164 bp, Artificial Sequence; identical to SEQ ID NO: 2896
  Synthetic polynucleotide

SEQ ID NO: 2898 - DNA, 180 bp, Artificial Sequence
  Synthetic polynucleotide
atcatctcaccttgcctcctgtagtgaccgatgcaaggcctgcagggatgagtcatgagagatgagtcatgtcggatgagtcatggacgatgagtcatgctagatgagtcatgactgatgagtcatgtgcgatgagtcatggtagatgagtcatgggcgcgccatgcttcatcagactct

SEQ ID NO: 2899 - DNA, 180 bp, Artificial Sequence; identical to SEQ ID NO: 2898
  Synthetic polynucleotide

SEQ ID NO: 2900 - DNA, 197 bp, Artificial Sequence
  Synthetic polynucleotide
atcatctcaccttgcctcctgcatcgaagaatgaagcacctgcaggggcgccccctggtggagaggcgccccctggtggtcgggcgccccctggtgggacggcgccccctggtggctaggcgccccctggtggactggcgccccctggtggtgcggcgccccctggtgggtaggcgcgccatgcttcatcagactct

SEQ ID NO: 2901 - DNA, 197 bp, Artificial Sequence; identical to SEQ ID NO: 2900
  Synthetic polynucleotide

SEQ ID NO: 2902 - DNA, 197 bp, Artificial Sequence
  Synthetic polynucleotide
atcatctcaccttgcctcctgacataatactatggccgcctgcaggagtgctgacgtaagcattagaagtgctgacgtaagcatttcgagtgctgacgtaagcattgacagtgctgacgtaagcattctaagtgctgacgtaagcattactagtgctgacgtaagcatttgcggcgcgccatgcttcatcagactct

SEQ ID NO: 2903 - DNA, 197 bp, Artificial Sequence; identical to SEQ ID NO: 2902
  Synthetic polynucleotide

SEQ ID NO: 2904 - DNA, 188 bp, Artificial Sequence
  Synthetic polynucleotide
atcatctcaccttgcctcctgccaaagcattgtggccacctgcaggccctcaagagccagaccctcaagagcctcgccctcaagagccgacccctcaagagccctaccctcaagagccactccctcaagagcctgcccctcaagagccgtaccctcaagagccggcgcgccatgcttcatcagactct

SEQ ID NO: 2905 - DNA, 188 bp, Artificial Sequence; identical to SEQ ID NO: 2904
  Synthetic polynucleotide

SEQ ID NO: 2906 - DNA, 172 bp, Artificial Sequence
  Synthetic polynucleotide
atcatctcaccttgcctcctgacaccgcgcattagtgccctgcaggtaatacattaagataatacattatcgtaatacattagactaatacattactataatacattaacttaatacattatgctaatacattagtataatacattaggcgcgccatgcttcatcagactct

SEQ ID NO: 2907 - DNA, 172 bp, Artificial Sequence; identical to SEQ ID NO: 2906
  Synthetic polynucleotide

SEQ ID NO: 2908 - DNA, 197 bp, Artificial Sequence
  Synthetic polynucleotide
atcatctcaccttgcctcctgtaaatcgcagagcgggacctgcaggctctgattggctggtagactctgattggctggttcgctctgattggctggtgacctctgattggctggtctactctgattggctggtactctctgattggctggttgcctctgattggctggtgtaggcgcgccatgcttcatcagactct

SEQ ID NO: 2909 - DNA, 197 bp, Artificial Sequence; identical to SEQ ID NO: 2908
  Synthetic polynucleotide

SEQ ID NO: 2910 - DNA, 164 bp, Artificial Sequence
  Synthetic polynucleotide
atcatctcaccttgcctcctggggccctgtgctattaacctgcagggttatctgtagagttatctgttcggttatctgtgacgttatctgtctagttatctgtactgttatctgttgcgttatctgtgtagttatctgtggcgcgccatgcttcatcagactct

SEQ ID NO: 2911 - DNA, 164 bp, Artificial Sequence; identical to SEQ ID NO: 2910
  Synthetic polynucleotide

SEQ ID NO: 2912 - DNA, 172 bp, Artificial Sequence
  Synthetic polynucleotide
atcatctcaccttgcctcctgggtaactttccttgtcacctgcaggcatagcaacgagacatagcaacgtcgcatagcaacggaccatagcaacgctacatagcaacgactcatagcaacgtgccatagcaacggtacatagcaacgggcgcgccatgcttcatcagactct

SEQ ID NO: 2913 - DNA, 172 bp, Artificial Sequence; identical to SEQ ID NO: 2912
  Synthetic polynucleotide

SEQ ID NO: 2914 - DNA, 191 bp, Artificial Sequence
  Synthetic polynucleotide
atcatctcaccttgcctcctgagctttatggtaagtaccctgcaggaaatttcgtcacggttaaggtagaaaatttcgtcacggttaaggttcgaaatttcgtcacggttaaggtgacaaatttcgtcacggttaaggtctaaaatttcgtcacggttaaggtactggcgcgccatgcttcatcagactct

SEQ ID NO: 2915 - DNA, 191 bp, Artificial Sequence; identical to SEQ ID NO: 2914
  Synthetic polynucleotide

SEQ ID NO: 2916 - DNA, 196 bp, Artificial Sequence
  Synthetic polynucleotide
atcatctcaccttgcctcctgtgtcgtcacattagacccctgcaggtttaatttgatttcgattaattagatttaatttgatttcgattaatttcgtttaatttgatttcgattaattgactttaatttgatttcgattaattctatttaatttgatttcgattaattactggcgcgccatgcttcatcagactct

SEQ ID NO: 2917 - DNA, 196 bp, Artificial Sequence; identical to SEQ ID NO: 2916
  Synthetic polynucleotide

SEQ ID NO: 2918 - DNA, 197 bp, Artificial Sequence
  Synthetic polynucleotide
atcatctcaccttgcctcctgggtaatcatgatggtgccctgcaggctcccgcccccactcagactcccgcccccactctcgctcccgcccccactcgacctcccgcccccactcctactcccgcccccactcactctcccgcccccactctgcctcccgcccccactcgtaggcgcgccatgcttcatcagactct

SEQ ID NO: 2919 - DNA, 197 bp, Artificial Sequence; identical to SEQ ID NO: 2918
  Synthetic polynucleotide

SEQ ID NO: 2920 - DNA, 172 bp, Artificial Sequence
  Synthetic polynucleotide
atcatctcaccttgcctcctggtctgtgcatgaagaaacctgcaggattatttatgagaattatttatgtcgattatttatggacattatttatgctaattatttatgactattatttatgtgcattatttatggtaattatttatgggcgcgccatgcttcatcagactct

SEQ ID NO: 2921 - DNA, 172 bp, Artificial Sequence; identical to SEQ ID NO: 2920
  Synthetic polynucleotide

SEQ ID NO: 2922 - DNA, 180 bp, Artificial Sequence
  Synthetic polynucleotide
atcatctcaccttgcctcctgacggtgcttacacggcacctgcagggggaatttcccagagggaatttccctcggggaatttcccgacgggaatttcccctagggaatttcccactgggaatttccctgcgggaatttcccgtagggaatttcccggcgcgccatgcttcatcagactct

SEQ ID NO: 2923 - DNA, 180 bp, Artificial Sequence; identical to SEQ ID NO: 2922
  Synthetic polynucleotide

SEQ ID NO: 2924 - DNA, 188 bp, Artificial Sequence
  Synthetic polynucleotide
atcatctcaccttgcctcctggatcattgcgcagcggtcctgcaggtttgtcatgtagagatttgtcatgtagtcgtttgtcatgtaggactttgtcatgtagctatttgtcatgtagacttttgtcatgtagtgctttgtcatgtaggtatttgtcatgtagggcgcgccatgcttcatcagactct

SEQ ID NO: 2925 - DNA, 188 bp, Artificial Sequence; identical to SEQ ID NO: 2924
  Synthetic polynucleotide

SEQ ID NO: 2926 - DNA, 191 bp, Artificial Sequence
  Synthetic polynucleotide
atcatctcaccttgcctcctgggaaataatcccacttgcctgcaggtgacctttgccctagttagatgacctttgccctagtttcgtgacctttgccctagttgactgacctttgccctagttctatgacctttgccctagttacttgacctttgccctagtttgcggcgcgccatgcttcatcagactct

SEQ ID NO: 2927 - DNA, 191 bp, Artificial Sequence; identical to SEQ ID NO: 2926
  Synthetic polynucleotide

SEQ ID NO: 2928 - DNA, 200 bp, Artificial Sequence
  Synthetic polynucleotide
atcatctcaccttgcctcctggacgcgtctttaccttccctgcaggccggccccgccccctccccagaccggccccgccccctcccctcgccggccccgccccctccccgacccggccccgccccctccccctaccggccccgccccctccccactccggccccgccccctccccggcgcgccatgcttcatcagactct

SEQ ID NO: 2929 - DNA, 200 bp, Artificial Sequence; identical to SEQ ID NO: 2928
  Synthetic polynucleotide

SEQ ID NO: 2930 - DNA, 190 bp, Artificial Sequence
  Synthetic polynucleotide
atcatctcaccttgcctcctggcgctacgatgggtttccctgcaggtgatgacgtcatcaagatgatgacgtcatcatcgtgatgacgtcatcagactgatgacgtcatcactatgatgacgtcatcaacttgatgacgtcatcatgctgatgacgtcatcagtaggcgcgccatgcttcatcagactct

SEQ ID NO: 2931 - DNA, 190 bp, Artificial Sequence; identical to SEQ ID NO: 2930
  Synthetic polynucleotide

SEQ ID NO: 2932 - DNA, 190 bp, Artificial Sequence
  Synthetic polynucleotide
atcatctcaccttgcctcctgcgtgactgtaacgacaccctgcaggaaatcacgtgatatagaaaatcacgtgatattcgaaatcacgtgatatgacaaatcacgtgatatctaaaatcacgtgatatactaaatcacgtgatattgcaaatcacgtgatatgtaggcgcgccatgcttcatcagactct

SEQ ID NO: 2933 - DNA, 190 bp, Artificial Sequence; identical to SEQ ID NO: 2932
  Synthetic polynucleotide

SEQ ID NO: 2934 - DNA, 172 bp, Artificial Sequence
  Synthetic polynucleotide
atcatctcaccttgcctcctggagtagcgatgctagcccctgcaggtctgattggcagatctgattggctcgtctgattggcgactctgattggcctatctgattggcacttctgattggctgctctgattggcgtatctgattggcggcgcgccatgcttcatcagactct

SEQ ID NO: 2935 - DNA, 172 bp, Artificial Sequence; identical to SEQ ID NO: 2934
  Synthetic polynucleotide

SEQ ID NO: 2936 - DNA, 197 bp, Artificial Sequence
  Synthetic polynucleotide
atcatctcaccttgcctcctgttatccaaacctataggcctgcagggccgccatcttggttagagccgccatcttggtttcggccgccatcttggttgacgccgccatcttggttctagccgccatcttggttactgccgccatcttggtttgcgccgccatcttggttgtaggcgcgccatgcttcatcagactct

SEQ ID NO: 2937 - DNA, 197 bp, Artificial Sequence; identical to SEQ ID NO: 2936
  Synthetic polynucleotide

SEQ ID NO: 2938 - DNA, 164 bp, Artificial Sequence
  Synthetic polynucleotide
atcatctcaccttgcctcctggatcgaaaccaacagcccctgcaggggggactttagaggggacttttcgggggactttgacggggactttctaggggactttactggggacttttgcggggactttgtaggggactttggcgcgccatgcttcatcagactct

SEQ ID NO: 2939 - DNA, 164 bp, Artificial Sequence; identical to SEQ ID NO: 2938
  Synthetic polynucleotide

SEQ ID NO: 2940 - DNA, 156 bp, Artificial Sequence
  Synthetic polynucleotide
atcatctcaccttgcctcctgccctacgggaccctaatcctgcaggaattaatcagaaattaatctcgaattaatcgacaattaatcctaaattaatcactaattaatctgcaattaatcgtaaattaatcggcgcgccatgcttcatcagactct

SEQ ID NO: 2941 - DNA, 156 bp, Artificial Sequence; identical to SEQ ID NO: 2940
  Synthetic polynucleotide

SEQ ID NO: 2942 - DNA, 164 bp, Artificial Sequence
  Synthetic polynucleotide
atcatctcaccttgcctcctgtcttcgggacatttgatcctgcaggccctatctgagaccctatctgtcgccctatctggacccctatctgctaccctatctgactccctatctgtgcccctatctggtaccctatctgggcgcgccatgcttcatcagactct

SEQ ID NO: 2943 - DNA, 164 bp, Artificial Sequence; identical to SEQ ID NO: 2942
  Synthetic polynucleotide

SEQ ID NO: 2944 - DNA, 180 bp, Artificial Sequence
  Synthetic polynucleotide
atcatctcaccttgcctcctgatttaaccattgcgcaacctgcagggatgagtcatcagagatgagtcatctcggatgagtcatcgacgatgagtcatcctagatgagtcatcactgatgagtcatctgcgatgagtcatcgtagatgagtcatcggcgcgccatgcttcatcagactct

SEQ ID NO: 2945 - DNA, 180 bp, Artificial Sequence; identical to SEQ ID NO: 2944
  Synthetic polynucleotide

SEQ ID NO: 2946 - DNA, 190 bp, Artificial Sequence
  Synthetic polynucleotide
atcatctcaccttgcctcctgcactaggacgtccgtgacctgcaggtgatgacgtcatcgagatgatgacgtcatcgtcgtgatgacgtcatcggactgatgacgtcatcgctatgatgacgtcatcgacttgatgacgtcatcgtgctgatgacgtcatcggtaggcgcgccatgcttcatcagactct

SEQ ID NO: 2947 - DNA, 190 bp, Artificial Sequence; identical to SEQ ID NO: 2946
  Synthetic polynucleotide

SEQ ID NO: 2948 - DNA, 190 bp, Artificial Sequence
  Synthetic polynucleotide
atcatctcaccttgcctcctgtaacatgtccttcgccacctgcaggggcgcaggaatgtgagaggcgcaggaatgtgtcgggcgcaggaatgtggacggcgcaggaatgtgctaggcgcaggaatgtgactggcgcaggaatgtgtgcggcgcaggaatgtggtaggcgcgccatgcttcatcagactct

SEQ ID NO: 2949 - DNA, 190 bp, Artificial Sequence; identical to SEQ ID NO: 2948
  Synthetic polynucleotide

SEQ ID NO: 2950 - DNA, 180 bp, Artificial Sequence
  Synthetic polynucleotide
atcatctcaccttgcctcctgcctcagtacatacatctcctgcaggaagtaattactagaaagtaattacttcgaagtaattactgacaagtaattactctaaagtaattactactaagtaattacttgcaagtaattactgtaaagtaattactggcgcgccatgcttcatcagactct

SEQ ID NO: 2951 - DNA, 180 bp, Artificial Sequence; identical to SEQ ID NO: 2950
  Synthetic polynucleotide

SEQ ID NO: 2952 - DNA, 191 bp, Artificial Sequence
  Synthetic polynucleotide
atcatctcaccttgcctcctggtttgttgacgccgatacctgcaggcgacccaatcaacggtgagacgacccaatcaacggtgtcgcgacccaatcaacggtggaccgacccaatcaacggtgctacgacccaatcaacggtgactcgacccaatcaacggtgtgcggcgcgccatgcttcatcagactct

SEQ ID NO: 2953 - DNA, 191 bp, Artificial Sequence; identical to SEQ ID NO: 2952
  Synthetic polynucleotide

SEQ ID NO: 2954 - DNA, 172 bp, Artificial Sequence
  Synthetic polynucleotide
atcatctcaccttgcctcctggggctagagttaacttacctgcagggataatatctagagataatatcttcggataatatctgacgataatatctctagataatatctactgataatatcttgcgataatatctgtagataatatctggcgcgccatgcttcatcagactct

SEQ ID NO: 2955 - DNA, 172 bp, Artificial Sequence; identical to SEQ ID NO: 2954
  Synthetic polynucleotide

SEQ ID NO: 2956 - DNA, 148 bp, Artificial Sequence
  Synthetic polynucleotide
atcatctcaccttgcctcctgttgtggagaaacgtggccctgcaggtttgtttagatttgttttcgtttgtttgactttgtttctatttgtttacttttgttttgctttgtttgtatttgtttggcgcgccatgcttcatcagactct

SEQ ID NO: 2957 - DNA, 148 bp, Artificial Sequence; identical to SEQ ID NO: 2956
  Synthetic polynucleotide

SEQ ID NO: 2958 - DNA, 180 bp, Artificial Sequence
  Synthetic polynucleotide
atcatctcaccttgcctcctggaatttcgattcagggacctgcagggccacgtgctcagagccacgtgctctcggccacgtgctcgacgccacgtgctcctagccacgtgctcactgccacgtgctctgcgccacgtgctcgtagccacgtgctcggcgcgccatgcttcatcagactct

SEQ ID NO: 2959 - DNA, 180 bp, Artificial Sequence; identical to SEQ ID NO: 2958
  Synthetic polynucleotide

SEQ ID NO: 2960 - DNA, 197 bp, Artificial Sequence
  Synthetic polynucleotide
atcatctcaccttgcctcctgggccagagaaaccgagacctgcaggcagatctcgcgagagagacagatctcgcgagagtcgcagatctcgcgagaggaccagatctcgcgagagctacagatctcgcgagagactcagatctcgcgagagtgccagatctcgcgagaggtaggcgcgccatgcttcatcagactct

SEQ ID NO: 2961 - DNA, 197 bp, Artificial Sequence; identical to SEQ ID NO: 2960
  Synthetic polynucleotide

SEQ ID NO: 2962 - DNA, 196 bp, Artificial Sequence
  Synthetic polynucleotide
atcatctcaccttgcctcctgtctgtgcacacaaagttcctgcagggatgatagagccgagagatgatagagccgtcggatgatagagccggacgatgatagagccgctagatgatagagccgactgatgatagagccgtgcgatgatagagccggtagatgatagagccgggcgcgccatgcttcatcagactct

SEQ ID NO: 2963 - DNA, 196 bp, Artificial Sequence; identical to SEQ ID NO: 2962
  Synthetic polynucleotide

SEQ ID NO: 2964 - DNA, 197 bp, Artificial Sequence
  Synthetic polynucleotide
atcatctcaccttgcctcctggtcaccaggtaactttacctgcaggaaggggatttccaaaagaaaggggatttccaaatcgaaggggatttccaaagacaaggggatttccaaactaaaggggatttccaaaactaaggggatttccaaatgcaaggggatttccaaagtaggcgcgccatgcttcatcagactct

SEQ ID NO: 2965 - DNA, 197 bp, Artificial Sequence; identical to SEQ ID NO: 2964
  Synthetic polynucleotide

SEQ ID NO: 2966 - DNA, 190 bp, Artificial Sequence
  Synthetic polynucleotide
atcatctcaccttgcctcctggggttcttgaccaaatccctgcaggtccatggtgctgaaagatccatggtgctgaatcgtccatggtgctgaagactccatggtgctgaactatccatggtgctgaaacttccatggtgctgaatgctccatggtgctgaagtaggcgcgccatgcttcatcagactct

SEQ ID NO: 2967 - DNA, 190 bp, Artificial Sequence; identical to SEQ ID NO: 2966
  Synthetic polynucleotide

SEQ ID NO: 2968 - DNA, 197 bp, Artificial Sequence
  Synthetic polynucleotide
atcatctcaccttgcctcctgtatacggccctgggttgcctgcaggactgcctcagggcatagaactgcctcagggcattcgactgcctcagggcatgacactgcctcagggcatctaactgcctcagggcatactactgcctcagggcattgcactgcctcagggcatgtaggcgcgccatgcttcatcagactct

SEQ ID NO: 2969 - DNA, 197 bp, Artificial Sequence; identical to SEQ ID NO: 2968
  Synthetic polynucleotide

SEQ ID NO: 2970 - DNA, 191 bp, Artificial Sequence
  Synthetic polynucleotide
atcatctcaccttgcctcctggcttcgggctgtgatatcctgcaggccttggcaacttgccagagaccttggcaacttgccagtcgccttggcaacttgccaggacccttggcaacttgccagctaccttggcaacttgccagactccttggcaacttgccagtgcggcgcgccatgcttcatcagactct

SEQ ID NO: 2971 - DNA, 191 bp, Artificial Sequence; identical to SEQ ID NO: 2970
  Synthetic polynucleotide

SEQ ID NO: 2972 - DNA, 172 bp, Artificial Sequence
  Synthetic polynucleotide
atcatctcaccttgcctcctgagagcacatcaagggtgcctgcaggttgtttattgagattgtttattgtcgttgtttattggacttgtttattgctattgtttattgactttgtttattgtgcttgtttattggtattgtttattgggcgcgccatgcttcatcagactct

SEQ ID NO: 2973 - DNA, 172 bp, Artificial Sequence; identical to SEQ ID NO: 2972
  Synthetic polynucleotide

SEQ ID NO: 2974 - DNA, 191 bp, Artificial Sequence
  Synthetic polynucleotide
atcatctcaccttgcctcctgctcaaagcaatttgttccctgcaggcaggaaactgaacagctgtccagacaggaaactgaacagctgtcctcgcaggaaactgaacagctgtccgaccaggaaactgaacagctgtccctacaggaaactgaacagctgtccactggcgcgccatgcttcatcagactct

SEQ ID NO: 2975 - DNA, 191 bp, Artificial Sequence; identical to SEQ ID NO: 2974
  Synthetic polynucleotide

SEQ ID NO: 2976 - DNA, 197 bp, Artificial Sequence
  Synthetic polynucleotide
atcatctcaccttgcctcctgttcaacagccgtcgattcctgcaggaaggggatttccaagagaaaggggatttccaagtcgaaggggatttccaaggacaaggggatttccaagctaaaggggatttccaagactaaggggatttccaagtgcaaggggatttccaaggtaggcgcgccatgcttcatcagactct

SEQ ID NO: 2977 - DNA, 197 bp, Artificial Sequence; identical to SEQ ID NO: 2976
  Synthetic polynucleotide

SEQ ID NO: 2978 - DNA, 172 bp, Artificial Sequence
  Synthetic polynucleotide
atcatctcaccttgcctcctggtggatattacctggtgcctgcaggccacgtggttagaccacgtggtttcgccacgtggttgacccacgtggttctaccacgtggttactccacgtggtttgcccacgtggttgtaccacgtggttggcgcgccatgcttcatcagactct

SEQ ID NO: 2979 - DNA, 172 bp, Artificial Sequence; identical to SEQ ID NO: 2978
  Synthetic polynucleotide

SEQ ID NO: 2980 - DNA, 180 bp, Artificial Sequence
  Synthetic polynucleotide
atcatctcaccttgcctcctgcgagtaattgttctctccctgcaggattgatacattagaattgatacatttcgattgatacattgacattgatacattctaattgatacattactattgatacatttgcattgatacattgtaattgatacattggcgcgccatgcttcatcagactct

SEQ ID NO: 2981 - DNA, 180 bp, Artificial Sequence; identical to SEQ ID NO: 2980
  Synthetic polynucleotide

SEQ ID NO: 2982 - DNA, 185 bp, Artificial Sequence
  Synthetic polynucleotide
atcatctcaccttgcctcctggatgtccgagcgctatccctgcaggtctggccagttcaggcagatctggccagttcaggctcgtctggccagttcaggcgactctggccagttcaggcctatctggccagttcaggcacttctggccagttcaggctgcggcgcgccatgcttcatcagactct

SEQ ID NO: 2983 - DNA, 185 bp, Artificial Sequence; identical to SEQ ID NO: 2982
  Synthetic polynucleotide

SEQ ID NO: 2984 - DNA, 180 bp, Artificial Sequence
  Synthetic polynucleotide
atcatctcaccttgcctcctggctattctccattcaaacctgcaggtgggcgtggccagatgggcgtggcctcgtgggcgtggccgactgggcgtggccctatgggcgtggccacttgggcgtggcctgctgggcgtggccgtatgggcgtggccggcgcgccatgcttcatcagactct

SEQ ID NO: 2985 - DNA, 180 bp, Artificial Sequence; identical to SEQ ID NO: 2984
  Synthetic polynucleotide

SEQ ID NO: 2986 - DNA, 180 bp, Artificial Sequence
  Synthetic polynucleotide
atcatctcaccttgcctcctgcgcttcaataatagcaccctgcaggaaatgagcaacagaaaatgagcaactcgaaatgagcaacgacaaatgagcaacctaaaatgagcaacactaaatgagcaactgcaaatgagcaacgtaaaatgagcaacggcgcgccatgcttcatcagactct

SEQ ID NO: 2987 - DNA, 180 bp, Artificial Sequence; identical to SEQ ID NO: 2986
  Synthetic polynucleotide

SEQ ID NO: 2988 - DNA, 156 bp, Artificial Sequence
  Synthetic polynucleotide
atcatctcaccttgcctcctgatacttgtgtagctcgtcctgcaggttacatttagattacattttcgttacatttgacttacatttctattacatttactttacattttgcttacatttgtattacatttggcgcgccatgcttcatcagactct

SEQ ID NO: 2989 - DNA, 156 bp, Artificial Sequence; identical to SEQ ID NO: 2988
  Synthetic polynucleotide

SEQ ID NO: 2990 - DNA, 185 bp, Artificial Sequence
  Synthetic polynucleotide
atcatctcaccttgcctcctgcgggatgccgaactagtcctgcaggggcagctaatccccctagaggcagctaatcccccttcgggcagctaatccccctgacggcagctaatccccctctaggcagctaatccccctactggcagctaatcccccttgcggcgcgccatgcttcatcagactct

SEQ ID NO: 2991 - DNA, 185 bp, Artificial Sequence; identical to SEQ ID NO: 2990
  Synthetic polynucleotide

SEQ ID NO: 2992 - DNA, 191 bp, Artificial Sequence
  Synthetic polynucleotide
atcatctcaccttgcctcctgatcctctggaaaccttgcctgcaggccatcgtacgtacactcagaccatcgtacgtacactctcgccatcgtacgtacactcgacccatcgtacgtacactcctaccatcgtacgtacactcactccatcgtacgtacactctgcggcgcgccatgcttcatcagactct

SEQ ID NO: 2993 - DNA, 191 bp, Artificial Sequence; identical to SEQ ID NO: 2992
  Synthetic polynucleotide

SEQ ID NO: 2994 - DNA, 172 bp, Artificial Sequence
  Synthetic polynucleotide
atcatctcaccttgcctcctgcgaaagcggatctgcttcctgcagggctaatccgtagagctaatccgttcggctaatccgtgacgctaatccgtctagctaatccgtactgctaatccgttgcgctaatccgtgtagctaatccgtggcgcgccatgcttcatcagactct

SEQ ID NO: 2995 - DNA, 172 bp, Artificial Sequence; identical to SEQ ID NO: 2994
  Synthetic polynucleotide

SEQ ID NO: 2996 - DNA, 172 bp, Artificial Sequence
  Synthetic polynucleotide
atcatctcaccttgcctcctgaccaggaactcgaatagcctgcaggtgaggtcacaagatgaggtcacatcgtgaggtcacagactgaggtcacactatgaggtcacaacttgaggtcacatgctgaggtcacagtatgaggtcacaggcgcgccatgcttcatcagactct

SEQ ID NO: 2997 - DNA, 172 bp, Artificial Sequence; identical to SEQ ID NO: 2996
  Synthetic polynucleotide

SEQ ID NO: 2998 - DNA, 191 bp, Artificial Sequence
  Synthetic polynucleotide
atcatctcaccttgcctcctgtacctacgggcttaattcctgcaggcccctcctgatgcccccagacccctcctgatgccccctcgcccctcctgatgcccccgaccccctcctgatgcccccctacccctcctgatgcccccactcccctcctgatgccccctgcggcgcgccatgcttcatcagactct

SEQ ID NO: 2999 - DNA, 191 bp, Artificial Sequence; identical to SEQ ID NO: 2998
  Synthetic polynucleotide

SEQ ID NO: 3000 - DNA, 197 bp, Artificial Sequence
  Synthetic polynucleotide
atcatctcaccttgcctcctgagcgtggtaatcatggacctgcaggggccgccattttgttagaggccgccattttgtttcgggccgccattttgttgacggccgccattttgttctaggccgccattttgttactggccgccattttgtttgcggccgccattttgttgtaggcgcgccatgcttcatcagactct

SEQ ID NO: 3001 - DNA, 197 bp, Artificial Sequence; identical to SEQ ID NO: 3000
  Synthetic polynucleotide

SEQ ID NO: 3002 - DNA, 172 bp, Artificial Sequence
  Synthetic polynucleotide
atcatctcaccttgcctcctggcatgtagcggaacattcctgcaggagcaggtgcgagaagcaggtgcgtcgagcaggtgcggacagcaggtgcgctaagcaggtgcgactagcaggtgcgtgcagcaggtgcggtaagcaggtgcgggcgcgccatgcttcatcagactct

SEQ ID NO: 3003 - DNA, 172 bp, Artificial Sequence; identical to SEQ ID NO: 3002
  Synthetic polynucleotide

SEQ ID NO: 3004 - DNA, 164 bp, Artificial Sequence
  Synthetic polynucleotide
atcatctcaccttgcctcctggctggtctgacgtcatgcctgcaggacagctcccagaacagctccctcgacagctcccgacacagctcccctaacagctcccactacagctccctgcacagctcccgtaacagctcccggcgcgccatgcttcatcagactct

SEQ ID NO: 3005 - DNA, 164 bp, Artificial Sequence; identical to SEQ ID NO: 3004
  Synthetic polynucleotide

SEQ ID NO: 3006 - DNA, 190 bp, Artificial Sequence
  Synthetic polynucleotide
atcatctcaccttgcctcctgcagtacgctgtttagctcctgcaggtttttgtttactcaagatttttgtttactcatcgtttttgtttactcagactttttgtttactcactatttttgtttactcaacttttttgtttactcatgctttttgtttactcagtaggcgcgccatgcttcatcagactct

SEQ ID NO: 3007 - DNA, 190 bp, Artificial Sequence; identical to SEQ ID NO: 3006
  Synthetic polynucleotide

SEQ ID NO: 3008 - DNA, 200 bp, Artificial Sequence
  Synthetic polynucleotide
atcatctcaccttgcctcctgcaggtctgaaagatattcctgcaggtcacaccttttaggtgtgaagatcacaccttttaggtgtgatcgtcacaccttttaggtgtgagactcacaccttttaggtgtgactatcacaccttttaggtgtgaacttcacaccttttaggtgtgaggcgcgccatgcttcatcagactct

SEQ ID NO: 3009 - DNA, 200 bp, Artificial Sequence; identical to SEQ ID NO: 3008
  Synthetic polynucleotide

SEQ ID NO: 3010 - DNA, 188 bp, Artificial Sequence
  Synthetic polynucleotide
atcatctcaccttgcctcctgcgaagagcggtcctatacctgcaggatgtaaacaagcagaatgtaaacaagctcgatgtaaacaagcgacatgtaaacaagcctaatgtaaacaagcactatgtaaacaagctgcatgtaaacaagcgtaatgtaaacaagcggcgcgccatgcttcatcagactct

SEQ ID NO: 3011 - DNA, 188 bp, Artificial Sequence; identical to SEQ ID NO: 3010
  Synthetic polynucleotide

SEQ ID NO: 3012 - DNA, 197 bp, Artificial Sequence
  Synthetic polynucleotide
atcatctcaccttgcctcctgtgcttggctctcagtatcctgcaggggcggccgccatcttagaggcggccgccatctttcgggcggccgccatcttgacggcggccgccatcttctaggcggccgccatcttactggcggccgccatctttgcggcggccgccatcttgtaggcgcgccatgcttcatcagactct

SEQ ID NO: 3013 - DNA, 197 bp, Artificial Sequence; identical to SEQ ID NO: 3012
  Synthetic polynucleotide

SEQ ID NO: 3014 - DNA, 172 bp, Artificial Sequence
  Synthetic polynucleotide
atcatctcaccttgcctcctgaaatgacagctaaagcacctgcaggggtctggcatagaggtctggcattcgggtctggcatgacggtctggcatctaggtctggcatactggtctggcattgcggtctggcatgtaggtctggcatggcgcgccatgcttcatcagactct

SEQ ID NO: 3015 - DNA, 172 bp, Artificial Sequence; identical to SEQ ID NO: 3014
  Synthetic polynucleotide

SEQ ID NO: 3016 - DNA, 191 bp, Artificial Sequence
  Synthetic polynucleotide
atcatctcaccttgcctcctgacgacattctctgaatccctgcaggaatcaatttcagtgattagaaatcaatttcagtgatttcgaatcaatttcagtgattgacaatcaatttcagtgattctaaatcaatttcagtgattactaatcaatttcagtgatttgcggcgcgccatgcttcatcagactct

SEQ ID NO: 3017 - DNA, 191 bp, Artificial Sequence; identical to SEQ ID NO: 3016
  Synthetic polynucleotide

SEQ ID NO: 3018 - DNA, 156 bp, Artificial Sequence
  Synthetic polynucleotide
atcatctcaccttgcctcctgtatgtatgatgcggcgtcctgcaggtattacgtagatattacgttcgtattacgtgactattacgtctatattacgtacttattacgttgctattacgtgtatattacgtggcgcgccatgcttcatcagactct

SEQ ID NO: 3019 - DNA, 156 bp, Artificial Sequence; identical to SEQ ID NO: 3018
  Synthetic polynucleotide

SEQ ID NO: 3020 - DNA, 172 bp, Artificial Sequence
  Synthetic polynucleotide
atcatctcaccttgcctcctgaatttatgtggcgtctacctgcaggaattttggcaagaaattttggcatcgaattttggcagacaattttggcactaaattttggcaactaattttggcatgcaattttggcagtaaattttggcaggcgcgccatgcttcatcagactct

SEQ ID NO: 3021 - DNA, 172 bp, Artificial Sequence; identical to SEQ ID NO: 3020
  Synthetic polynucleotide

SEQ ID NO: 3022 - DNA, 196 bp, Artificial Sequence
  Synthetic polynucleotide
atcatctcaccttgcctcctgcgccatggaatgtgtcgcctgcaggaaggtgtgaaaatagaaaggtgtgaaaattcgaaggtgtgaaaatgacaaggtgtgaaaatctaaaggtgtgaaaatactaaggtgtgaaaattgcaaggtgtgaaaatgtaaaggtgtgaaaatggcgcgccatgcttcatcagactct

SEQ ID NO: 3023 - DNA, 196 bp, Artificial Sequence; identical to SEQ ID NO: 3022
  Synthetic polynucleotide

SEQ ID NO: 3024 - DNA, 140 bp, Artificial Sequence
  Synthetic polynucleotide
atcatctcaccttgcctcctggcgtaattgaatcccatcctgcagggtatcaagagtatcatcggtatcagacgtatcactagtatcaactgtatcatgcgtatcagtagtatcaggcgcgccatgcttcatcagactct

SEQ ID NO: 3025 - DNA, 140 bp, Artificial Sequence; identical to SEQ ID NO: 3024
  Synthetic polynucleotide

SEQ ID NO: 3026 - DNA, 164 bp, Artificial Sequence
  Synthetic polynucleotide
atcatctcaccttgcctcctggttgtggacgtttaccacctgcaggacagctcctagaacagctccttcgacagctcctgacacagctcctctaacagctcctactacagctccttgcacagctcctgtaacagctcctggcgcgccatgcttcatcagactct

SEQ ID NO: 3027 - DNA, 164 bp, Artificial Sequence; identical to SEQ ID NO: 3026
  Synthetic polynucleotide

SEQ ID NO: 3028 - DNA, 197 bp, Artificial Sequence
  Synthetic polynucleotide
atcatctcaccttgcctcctgaaagaggagtaatcctccctgcaggtaaccgcaaaaaccgcaaagataaccgcaaaaaccgcaatcgtaaccgcaaaaaccgcaagactaaccgcaaaaaccgcaactataaccgcaaaaaccgcaaacttaaccgcaaaaaccgcaatgcggcgcgccatgcttcatcagactct

SEQ ID NO: 3029 - DNA, 197 bp, Artificial Sequence; identical to SEQ ID NO: 3028
  Synthetic polynucleotide

SEQ ID NO: 3030 - DNA, 196 bp, Artificial Sequence
  Synthetic polynucleotide
atcatctcaccttgcctcctgattcaccgagtccactgcctgcaggactagacgagatgagaactagacgagatgtcgactagacgagatggacactagacgagatgctaactagacgagatgactactagacgagatgtgcactagacgagatggtaactagacgagatgggcgcgccatgcttcatcagactct

SEQ ID NO: 3031 - DNA, 196 bp, Artificial Sequence; identical to SEQ ID NO: 3030
  Synthetic polynucleotide

SEQ ID NO: 3032 - DNA, 200 bp, Artificial Sequence
  Synthetic polynucleotide
atcatctcaccttgcctcctgctgccagctatggacttcctgcagggttgccatggcaaccgcggagagttgccatggcaaccgcggtcggttgccatggcaaccgcgggacgttgccatggcaaccgcggctagttgccatggcaaccgcggactgttgccatggcaaccgcggggcgcgccatgcttcatcagactct

SEQ ID NO: 3033 - DNA, 200 bp, Artificial Sequence; identical to SEQ ID NO: 3032
  Synthetic polynucleotide

SEQ ID NO: 3034 - DNA, 199 bp, Artificial Sequence
  Synthetic polynucleotide
atcatctcaccttgcctcctgcccatccataccttagacctgcaggcacctgttcaatttggcacggagccaacaagacacctgttcaatttggcacggagccaacatcgcacctgttcaatttggcacggagccaacagaccacctgttcaatttggcacggagccaacactaggcgcgccatgcttcatcagactct

SEQ ID NO: 3035 - DNA, 199 bp, Artificial Sequence; identical to SEQ ID NO: 3034
  Synthetic polynucleotide

SEQ ID NO: 3036 - DNA, 197 bp, Artificial Sequence
  Synthetic polynucleotide
atcatctcaccttgcctcctgactaagtaaaggacctgcctgcaggataaacaattaatcaagaataaacaattaatcatcgataaacaattaatcagacataaacaattaatcactaataaacaattaatcaactataaacaattaatcatgcataaacaattaatcagtaggcgcgccatgcttcatcagactct

SEQ ID NO: 3037 - DNA, 197 bp, Artificial Sequence; identical to SEQ ID NO: 3036
  Synthetic polynucleotide

SEQ ID NO: 3038 - DNA, 156 bp, Artificial Sequence
  Synthetic polynucleotide
atcatctcaccttgcctcctggcctaaactattatgtgcctgcaggggcagctgagaggcagctgtcgggcagctggacggcagctgctaggcagctgactggcagctgtgcggcagctggtaggcagctgggcgcgccatgcttcatcagactct

SEQ ID NO: 3039 - DNA, 156 bp, Artificial Sequence; identical to SEQ ID NO: 3038
  Synthetic polynucleotide

SEQ ID NO: 3040 - DNA, 197 bp, Artificial Sequence
  Synthetic polynucleotide
atcatctcaccttgcctcctgaaccggaacttgttgctcctgcaggtacgtaactgacgtaagatacgtaactgacgtatcgtacgtaactgacgtagactacgtaactgacgtactatacgtaactgacgtaacttacgtaactgacgtatgctacgtaactgacgtagtaggcgcgccatgcttcatcagactct

SEQ ID NO: 3041 - DNA, 197 bp, Artificial Sequence; identical to SEQ ID NO: 3040
  Synthetic polynucleotide

SEQ ID NO: 3042 - DNA, 190 bp, Artificial Sequence
  Synthetic polynucleotide
atcatctcaccttgcctcctggtatttagcaccctacacctgcagggtaaacaataaacaagagtaaacaataaacatcggtaaacaataaacagacgtaaacaataaacactagtaaacaataaacaactgtaaacaataaacatgcgtaaacaataaacagtaggcgcgccatgcttcatcagactct

SEQ ID NO: 3043 - DNA, 190 bp, Artificial Sequence; identical to SEQ ID NO: 3042
  Synthetic polynucleotide

SEQ ID NO: 3044 - DNA, 197 bp, Artificial Sequence
  Synthetic polynucleotide
atcatctcaccttgcctcctgattgtgcctttccggcccctgcaggtgatgactcatacttagatgatgactcatactttcgtgatgactcatacttgactgatgactcatacttctatgatgactcatacttacttgatgactcatactttgctgatgactcatacttgtaggcgcgccatgcttcatcagactct

SEQ ID NO: 3045 - DNA, 197 bp, Artificial Sequence; identical to SEQ ID NO: 3044
  Synthetic polynucleotide

SEQ ID NO: 3046 - DNA, 185 bp, Artificial Sequence
  Synthetic polynucleotide
atcatctcaccttgcctcctgttagcctcgtgcgaagacctgcaggctgaagtaattattccagactgaagtaattattcctcgctgaagtaattattccgacctgaagtaattattccctactgaagtaattattccactctgaagtaattattcctgcggcgcgccatgcttcatcagactct

SEQ ID NO: 3047 - DNA, 185 bp, Artificial Sequence; identical to SEQ ID NO: 3046
  Synthetic polynucleotide

SEQ ID NO: 3048 - DNA, 188 bp, Artificial Sequence
  Synthetic polynucleotide
atcatctcaccttgcctcctgagtcccatgacgccacacctgcagggccacgcccactagagccacgcccacttcggccacgcccactgacgccacgcccactctagccacgcccactactgccacgcccacttgcgccacgcccactgtagccacgcccactggcgcgccatgcttcatcagactct

SEQ ID NO: 3049 - DNA, 188 bp, Artificial Sequence; identical to SEQ ID NO: 3048
  Synthetic polynucleotide

SEQ ID NO: 3050 - DNA, 196 bp, Artificial Sequence
  Synthetic polynucleotide
atcatctcaccttgcctcctgtgtcaattggacatgtgcctgcagggtgaccttgggctagagtgaccttgggcttcggtgaccttgggctgacgtgaccttgggctctagtgaccttgggctactgtgaccttgggcttgcgtgaccttgggctgtagtgaccttgggctggcgcgccatgcttcatcagactct

SEQ ID NO: 3051 - DNA, 196 bp, Artificial Sequence; identical to SEQ ID NO: 3050
  Synthetic polynucleotide

SEQ ID NO: 3052 - DNA, 197 bp, Artificial Sequence
  Synthetic polynucleotide
atcatctcaccttgcctcctgaaaggcggtcaagttgtcctgcaggaatgcttacgtcagcactagaaatgcttacgtcagcacttcgaatgcttacgtcagcactgacaatgcttacgtcagcactctaaatgcttacgtcagcactactaatgcttacgtcagcacttgcggcgcgccatgcttcatcagactct

SEQ ID NO: 3053 - DNA, 197 bp, Artificial Sequence; identical to SEQ ID NO: 3052
  Synthetic polynucleotide

SEQ ID NO: 3054 - DNA, 190 bp, Artificial Sequence
  Synthetic polynucleotide
atcatctcaccttgcctcctgacatgtcgtacttgtgacctgcaggttggaaatccccttagattggaaatcccctttcgttggaaatccccttgacttggaaatccccttctattggaaatccccttactttggaaatcccctttgcttggaaatccccttgtaggcgcgccatgcttcatcagactct

SEQ ID NO: 3055 - DNA, 190 bp, Artificial Sequence; identical to SEQ ID NO: 3054
  Synthetic polynucleotide

SEQ ID NO: 3056 - DNA, 185 bp, Artificial Sequence
  Synthetic polynucleotide
atcatctcaccttgcctcctgggcgtggtctgaaacaccctgcagggggaacagatggtctcagagggaacagatggtctctcggggaacagatggtctcgacgggaacagatggtctcctagggaacagatggtctcactgggaacagatggtctctgcggcgcgccatgcttcatcagactct

SEQ ID NO: 3057 - DNA, 185 bp, Artificial Sequence; identical to SEQ ID NO: 3056
  Synthetic polynucleotide

SEQ ID NO: 3058 - DNA, 197 bp, Artificial Sequence
  Synthetic polynucleotide
atcatctcaccttgcctcctgcccttcaagttgcccatcctgcaggttcccctcagggaatagattcccctcagggaattcgttcccctcagggaatgacttcccctcagggaatctattcccctcagggaatactttcccctcagggaattgcttcccctcagggaatgtaggcgcgccatgcttcatcagactct

SEQ ID NO: 3059 - DNA, 197 bp, Artificial Sequence; identical to SEQ ID NO: 3058
  Synthetic polynucleotide

SEQ ID NO: 3060 - DNA, 172 bp, Artificial Sequence
  Synthetic polynucleotide
atcatctcaccttgcctcctgaccgaatgcacatagtccctgcaggctgacgtcacagactgacgtcactcgctgacgtcacgacctgacgtcacctactgacgtcacactctgacgtcactgcctgacgtcacgtactgacgtcacggcgcgccatgcttcatcagactct

SEQ ID NO: 3061 - DNA, 172 bp, Artificial Sequence; identical to SEQ ID NO: 3060
  Synthetic polynucleotide

SEQ ID NO: 3062 - DNA, 180 bp, Artificial Sequence
  Synthetic polynucleotide
atcatctcaccttgcctcctgggaagtccagagcctttcctgcaggtttgtttacatagatttgtttacattcgtttgtttacatgactttgtttacatctatttgtttacatacttttgtttacattgctttgtttacatgtatttgtttacatggcgcgccatgcttcatcagactct

SEQ ID NO: 3063 - DNA, 180 bp, Artificial Sequence; identical to SEQ ID NO: 3062
  Synthetic polynucleotide

SEQ ID NO: 3064 - DNA, 156 bp, Artificial Sequence
  Synthetic polynucleotide
atcatctcaccttgcctcctgtttaggcgcaaagtcagcctgcaggaacacgtgagaaacacgtgtcgaacacgtggacaacacgtgctaaacacgtgactaacacgtgtgcaacacgtggtaaacacgtgggcgcgccatgcttcatcagactct

SEQ ID NO: 3065 - DNA, 156 bp, Artificial Sequence; identical to SEQ ID NO: 3064
  Synthetic polynucleotide

SEQ ID NO: 3066 - DNA, 164 bp, Artificial Sequence
  Synthetic polynucleotide
atcatctcaccttgcctcctgcgttgtgcacctgtacacctgcaggtttgggagaagatttgggagatcgtttgggagagactttgggagactatttgggagaacttttgggagatgctttgggagagtatttgggagaggcgcgccatgcttcatcagactct

SEQ ID NO: 3067 - DNA, 164 bp, Artificial Sequence; identical to SEQ ID NO: 3066
  Synthetic polynucleotide

SEQ ID NO: 3068 - DNA, 172 bp, Artificial Sequence
  Synthetic polynucleotide
atcatctcaccttgcctcctggtgcaatgctcatttgtcctgcaggaattttggctagaaattttggcttcgaattttggctgacaattttggctctaaattttggctactaattttggcttgcaattttggctgtaaattttggctggcgcgccatgcttcatcagactct

SEQ ID NO: 3069 - DNA, 172 bp, Artificial Sequence; identical to SEQ ID NO: 3068
  Synthetic polynucleotide

SEQ ID NO: 3070 - DNA, 185 bp, Artificial Sequence
  Synthetic polynucleotide
atcatctcaccttgcctcctgtgccatctgttagagagcctgcaggccgaccatctgttcagagaccgaccatctgttcagtcgccgaccatctgttcaggacccgaccatctgttcagctaccgaccatctgttcagactccgaccatctgttcagtgcggcgcgccatgcttcatcagactct

SEQ ID NO: 3071 - DNA, 185 bp, Artificial Sequence; identical to SEQ ID NO: 3070
  Synthetic polynucleotide

SEQ ID NO: 3072 - DNA, 164 bp, Artificial Sequence
  Synthetic polynucleotide
atcatctcaccttgcctcctgaaatcttcgtcgcccaacctgcaggactggacttagaactggactttcgactggacttgacactggacttctaactggacttactactggactttgcactggacttgtaactggacttggcgcgccatgcttcatcagactct

SEQ ID NO: 3073 - DNA, 164 bp, Artificial Sequence; identical to SEQ ID NO: 3072
  Synthetic polynucleotide

SEQ ID NO: 3074 - DNA, 172 bp, Artificial Sequence
  Synthetic polynucleotide
atcatctcaccttgcctcctggctcttgatcgcctactcctgcaggaggtcattaaagaaggtcattaatcgaggtcattaagacaggtcattaactaaggtcattaaactaggtcattaatgcaggtcattaagtaaggtcattaaggcgcgccatgcttcatcagactct

SEQ ID NO: 3075 - DNA, 172 bp, Artificial Sequence; identical to SEQ ID NO: 3074
  Synthetic polynucleotide

SEQ ID NO: 3076 - DNA, 164 bp, Artificial Sequence
  Synthetic polynucleotide
atcatctcaccttgcctcctgcttagtacggccgacctcctgcaggatgacaggtagaatgacaggttcgatgacaggtgacatgacaggtctaatgacaggtactatgacaggttgcatgacaggtgtaatgacaggtggcgcgccatgcttcatcagactct

SEQ ID NO: 3077 - DNA, 164 bp, Artificial Sequence; identical to SEQ ID NO: 3076
  Synthetic polynucleotide

SEQ ID NO: 3078 - DNA, 197 bp, Artificial Sequence
  Synthetic polynucleotide
atcatctcaccttgcctcctgatcattctggcgggacccctgcaggacggcaggtgtccccagaacggcaggtgtcccctcgacggcaggtgtccccgacacggcaggtgtccccctaacggcaggtgtccccactacggcaggtgtcccctgcacggcaggtgtccccgtaggcgcgccatgcttcatcagactct

SEQ ID NO: 3079 - DNA, 197 bp, Artificial Sequence; identical to SEQ ID NO: 3078
  Synthetic polynucleotide

SEQ ID NO: 3080 - DNA, 188 bp, Artificial Sequence
  Synthetic polynucleotide
atcatctcaccttgcctcctgtgtcccacgagactgagcctgcaggaagattgcgcaaagaaagattgcgcaatcgaagattgcgcaagacaagattgcgcaactaaagattgcgcaaactaagattgcgcaatgcaagattgcgcaagtaaagattgcgcaaggcgcgccatgcttcatcagactct

SEQ ID NO: 3081 - DNA, 188 bp, Artificial Sequence; identical to SEQ ID NO: 3080
  Synthetic polynucleotide

SEQ ID NO: 3082 - DNA, 186 bp, Artificial Sequence
  Synthetic polynucleotide
atcatctcaccttgcctcctggtcacgttgagtttgcacctgcaggttcacacctctaggtgtgaaagattcacacctctaggtgtgaatcgttcacacctctaggtgtgaagacttcacacctctaggtgtgaactattcacacctctaggtgtgaaactggcgcgccatgcttcatcagactct

SEQ ID NO: 3083 - DNA, 186 bp, Artificial Sequence; identical to SEQ ID NO: 3082
  Synthetic polynucleotide

SEQ ID NO: 3084 - DNA, 180 bp, Artificial Sequence
  Synthetic polynucleotide
atcatctcaccttgcctcctgggttcttataggaggctcctgcaggttattatatatagattattatatattcgttattatatatgacttattatatatctattattatatatactttattatatattgcttattatatatgtattattatatatggcgcgccatgcttcatcagactct

SEQ ID NO: 3085 - DNA, 180 bp, Artificial Sequence; identical to SEQ ID NO: 3084
  Synthetic polynucleotide

SEQ ID NO: 3086 - DNA, 185 bp, Artificial Sequence
  Synthetic polynucleotide
atcatctcaccttgcctcctgacacgaggatcaacacgcctgcaggttaatgagctaattaaagattaatgagctaattaatcgttaatgagctaattaagacttaatgagctaattaactattaatgagctaattaaactttaatgagctaattaatgcggcgcgccatgcttcatcagactct

SEQ ID NO: 3087 - DNA, 185 bp, Artificial Sequence; identical to SEQ ID NO: 3086
  Synthetic polynucleotide

SEQ ID NO: 3088 - DNA, 180 bp, Artificial Sequence
  Synthetic polynucleotide
atcatctcaccttgcctcctgctgtgcactcataactgcctgcagggccgccatcttagagccgccatctttcggccgccatcttgacgccgccatcttctagccgccatcttactgccgccatctttgcgccgccatcttgtagccgccatcttggcgcgccatgcttcatcagactct

SEQ ID NO: 3089 - DNA, 180 bp, Artificial Sequence; identical to SEQ ID NO: 3088
  Synthetic polynucleotide

SEQ ID NO: 3090 - DNA, 191 bp, Artificial Sequence
  Synthetic polynucleotide
atcatctcaccttgcctcctgagcatatgctaggcgtccctgcaggaaacaatgacattgtttagaaaacaatgacattgttttcgaaacaatgacattgtttgacaaacaatgacattgtttctaaaacaatgacattgtttactaaacaatgacattgttttgcggcgcgccatgcttcatcagactct

SEQ ID NO: 3091 - DNA, 191 bp, Artificial Sequence; identical to SEQ ID NO: 3090
  Synthetic polynucleotide

SEQ ID NO: 3092 - DNA, 172 bp, Artificial Sequence
  Synthetic polynucleotide
atcatctcaccttgcctcctgctgagcgcaggtcatagcctgcaggagcagctgctagaagcagctgcttcgagcagctgctgacagcagctgctctaagcagctgctactagcagctgcttgcagcagctgctgtaagcagctgctggcgcgccatgcttcatcagactct

SEQ ID NO: 3093 - DNA, 172 bp, Artificial Sequence; identical to SEQ ID NO: 3092
  Synthetic polynucleotide

SEQ ID NO: 3094 - DNA, 180 bp, Artificial Sequence
  Synthetic polynucleotide
atcatctcaccttgcctcctgtgggctagcttgctgcacctgcaggaagatcaaaggagaaagatcaaaggtcgaagatcaaagggacaagatcaaaggctaaagatcaaaggactaagatcaaaggtgcaagatcaaagggtaaagatcaaaggggcgcgccatgcttcatcagactct

SEQ ID NO: 3095 - DNA, 180 bp, Artificial Sequence; identical to SEQ ID NO: 3094
  Synthetic polynucleotide

SEQ ID NO: 3096 - DNA, 191 bp, Artificial Sequence
  Synthetic polynucleotide
atcatctcaccttgcctcctgtcaactggatgtggtgccctgcagggcccagaacattctgttccctagagcccagaacattctgttcccttcggcccagaacattctgttccctgacgcccagaacattctgttccctctagcccagaacattctgttccctactggcgcgccatgcttcatcagactct

SEQ ID NO: 3097 - DNA, 191 bp, Artificial Sequence; identical to SEQ ID NO: 3096
  Synthetic polynucleotide

SEQ ID NO: 3098 - DNA, 191 bp, Artificial Sequence
  Synthetic polynucleotide
atcatctcaccttgcctcctgggttgtgcactattccccctgcaggcacttccgccggaagtgagacacttccgccggaagtgtcgcacttccgccggaagtggaccacttccgccggaagtgctacacttccgccggaagtgactcacttccgccggaagtgtgcggcgcgccatgcttcatcagactct

SEQ ID NO: 3099 - DNA, 191 bp, Artificial Sequence; identical to SEQ ID NO: 3098
  Synthetic polynucleotide

SEQ ID NO: 3100 - DNA, 172 bp, Artificial Sequence
  Synthetic polynucleotide
atcatctcaccttgcctcctgatgatcgtgagacggatcctgcagggataattacaagagataattacatcggataattacagacgataattacactagataattacaactgataattacatgcgataattacagtagataattacaggcgcgccatgcttcatcagactct

SEQ ID NO: 3101 - DNA, 172 bp, Artificial Sequence; identical to SEQ ID NO: 3100
  Synthetic polynucleotide

SEQ ID NO: 3102 - DNA, 197 bp, Artificial Sequence
  Synthetic polynucleotide
atcatctcaccttgcctcctgagcctcattgaggtcaccctgcagggcggacacctgccggagagcggacacctgccggtcggcggacacctgccgggacgcggacacctgccggctagcggacacctgccggactgcggacacctgccggtgcgcggacacctgccgggtaggcgcgccatgcttcatcagactct

SEQ ID NO: 3103 - DNA, 197 bp, Artificial Sequence; identical to SEQ ID NO: 3102
  Synthetic polynucleotide

SEQ ID NO: 3104 - DNA, 197 bp, Artificial Sequence
  Synthetic polynucleotide
atcatctcaccttgcctcctgtgtgcaactgaatgctacctgcaggatgactgcaattcatagaatgactgcaattcattcgatgactgcaattcatgacatgactgcaattcatctaatgactgcaattcatactatgactgcaattcattgcatgactgcaattcatgtaggcgcgccatgcttcatcagactct

SEQ ID NO: 3105 - DNA, 197 bp, Artificial Sequence; identical to SEQ ID NO: 3104
  Synthetic polynucleotide

SEQ ID NO: 3106 - DNA, 164 bp, Artificial Sequence
  Synthetic polynucleotide
atcatctcaccttgcctcctgtagaccctcgttctagccctgcaggccctcccccagaccctccccctcgccctcccccgacccctcccccctaccctcccccactccctccccctgcccctcccccgtaccctcccccggcgcgccatgcttcatcagactct

SEQ ID NO: 3107 - DNA, 164 bp, Artificial Sequence; identical to SEQ ID NO: 3106
  Synthetic polynucleotide

SEQ ID NO: 3108 - DNA, 186 bp, Artificial Sequence
  Synthetic polynucleotide
atcatctcaccttgcctcctggcgcgggagatacgtttcctgcaggcaagtaacacgtgacacttgagacaagtaacacgtgacacttgtcgcaagtaacacgtgacacttggaccaagtaacacgtgacacttgctacaagtaacacgtgacacttgactggcgcgccatgcttcatcagactct

SEQ ID NO: 3109 - DNA, 186 bp, Artificial Sequence; identical to SEQ ID NO: 3108
  Synthetic polynucleotide

SEQ ID NO: 3110 - DNA, 196 bp, Artificial Sequence
  Synthetic polynucleotide
atcatctcaccttgcctcctgtcgtggtattggcatcgcctgcaggaggtaaacaaacaagaaggtaaacaaacatcgaggtaaacaaacagacaggtaaacaaacactaaggtaaacaaacaactaggtaaacaaacatgcaggtaaacaaacagtaaggtaaacaaacaggcgcgccatgcttcatcagactct

SEQ ID NO: 3111 - DNA, 196 bp, Artificial Sequence; identical to SEQ ID NO: 3110
  Synthetic polynucleotide

SEQ ID NO: 3112 - DNA, 180 bp, Artificial Sequence
  Synthetic polynucleotide
atcatctcaccttgcctcctggcacaattatgaagtgtcctgcagggccacgcccacagagccacgcccactcggccacgcccacgacgccacgcccacctagccacgcccacactgccacgcccactgcgccacgcccacgtagccacgcccacggcgcgccatgcttcatcagactct

SEQ ID NO: 3113 - DNA, 180 bp, Artificial Sequence; identical to SEQ ID NO: 3112
  Synthetic polynucleotide

SEQ ID NO: 3114 - DNA, 197 bp, Artificial Sequence
  Synthetic polynucleotide
atcatctcaccttgcctcctgcgccagggtattatgtacctgcaggagttaatgattaactagaagttaatgattaacttcgagttaatgattaactgacagttaatgattaactctaagttaatgattaactactagttaatgattaacttgcagttaatgattaactgtaggcgcgccatgcttcatcagactct

SEQ ID NO: 3115 - DNA, 197 bp, Artificial Sequence; identical to SEQ ID NO: 3114
  Synthetic polynucleotide

SEQ ID NO: 3116 - DNA, 197 bp, Artificial Sequence
  Synthetic polynucleotide
atcatctcaccttgcctcctgaattagagtaccaggtccctgcaggaggtgtgacttcacacctagaaggtgtgacttcacaccttcgaggtgtgacttcacacctgacaggtgtgacttcacacctctaaggtgtgacttcacacctactaggtgtgacttcacaccttgcggcgcgccatgcttcatcagactct

SEQ ID NO: 3117 - DNA, 197 bp, Artificial Sequence; identical to SEQ ID NO: 3116
  Synthetic polynucleotide

SEQ ID NO: 3118 - DNA, 197 bp, Artificial Sequence
  Synthetic polynucleotide
atcatctcaccttgcctcctgatcacaaggaattaaggcctgcaggaaatggaccaatcagagaaaatggaccaatcagtcgaaatggaccaatcaggacaaatggaccaatcagctaaaatggaccaatcagactaaatggaccaatcagtgcaaatggaccaatcaggtaggcgcgccatgcttcatcagactct

SEQ ID NO: 3119 - DNA, 197 bp, Artificial Sequence; identical to SEQ ID NO: 3118
  Synthetic polynucleotide

SEQ ID NO: 3120 - DNA, 191 bp, Artificial Sequence
  Synthetic polynucleotide
atcatctcaccttgcctcctgacaatgctgaagcagctcctgcaggttcgtggcatttttctaagattcgtggcatttttctatcgttcgtggcatttttctagacttcgtggcatttttctactattcgtggcatttttctaactttcgtggcatttttctatgcggcgcgccatgcttcatcagactct

SEQ ID NO: 3121 - DNA, 191 bp, Artificial Sequence; identical to SEQ ID NO: 3120
  Synthetic polynucleotide

SEQ ID NO: 3122 - DNA, 180 bp, Artificial Sequence
  Synthetic polynucleotide
atcatctcaccttgcctcctgaagcgcgtcattcgtgtcctgcagggggcgggaaggagagggcgggaaggtcggggcgggaagggacgggcgggaaggctagggcgggaaggactgggcgggaaggtgcgggcgggaagggtagggcgggaaggggcgcgccatgcttcatcagactct

SEQ ID NO: 3123 - DNA, 180 bp, Artificial Sequence; identical to SEQ ID NO: 3122
  Synthetic polynucleotide

SEQ ID NO: 3124 - DNA, 172 bp, Artificial Sequence
  Synthetic polynucleotide
atcatctcaccttgcctcctgaccgtcgcaactcacatcctgcaggttatcgattaagattatcgattatcgttatcgattagacttatcgattactattatcgattaactttatcgattatgcttatcgattagtattatcgattaggcgcgccatgcttcatcagactct

SEQ ID NO: 3125 - DNA, 172 bp, Artificial Sequence; identical to SEQ ID NO: 3124
  Synthetic polynucleotide

SEQ ID NO: 3126 - DNA, 156 bp, Artificial Sequence
  Synthetic polynucleotide
atcatctcaccttgcctcctgccgtttacttagagaaacctgcaggaccgcgtgagaaccgcgtgtcgaccgcgtggacaccgcgtgctaaccgcgtgactaccgcgtgtgcaccgcgtggtaaccgcgtgggcgcgccatgcttcatcagactct

SEQ ID NO: 3127 - DNA, 156 bp, Artificial Sequence; identical to SEQ ID NO: 3126
  Synthetic polynucleotide

SEQ ID NO: 3128 - DNA, 197 bp, Artificial Sequence
  Synthetic polynucleotide
atcatctcaccttgcctcctgtgacttacactgcaaaccctgcaggatcgcgcgcccttatagaatcgcgcgcccttattcgatcgcgcgcccttatgacatcgcgcgcccttatctaatcgcgcgcccttatactatcgcgcgcccttattgcatcgcgcgcccttatgtaggcgcgccatgcttcatcagactct

SEQ ID NO: 3129 - DNA, 197 bp, Artificial Sequence; identical to SEQ ID NO: 3128
  Synthetic polynucleotide

SEQ ID NO: 3130 - DNA, 196 bp, Artificial Sequence
  Synthetic polynucleotide
atcatctcaccttgcctcctgctatgagaaaccactgacctgcaggcgtttcccacagtagacgtttcccacagttcgcgtttcccacagtgaccgtttcccacagtctacgtttcccacagtactcgtttcccacagttgccgtttcccacagtgtacgtttcccacagtggcgcgccatgcttcatcagactct

SEQ ID NO: 3131 - DNA, 196 bp, Artificial Sequence; identical to SEQ ID NO: 3130
  Synthetic polynucleotide

SEQ ID NO: 3132 - DNA, 188 bp, Artificial Sequence
  Synthetic polynucleotide
atcatctcaccttgcctcctggcgtagcttatgtgcaacctgcaggataattggattaagaataattggattatcgataattggattagacataattggattactaataattggattaactataattggattatgcataattggattagtaataattggattaggcgcgccatgcttcatcagactct

SEQ ID NO: 3133 - DNA, 188 bp, Artificial Sequence; identical to SEQ ID NO: 3132
  Synthetic polynucleotide

SEQ ID NO: 3134 - DNA, 172 bp, Artificial Sequence
  Synthetic polynucleotide
atcatctcaccttgcctcctgccagagtatgacatgatcctgcaggccaaatcgggagaccaaatcgggtcgccaaatcggggacccaaatcgggctaccaaatcgggactccaaatcgggtgcccaaatcggggtaccaaatcgggggcgcgccatgcttcatcagactct

SEQ ID NO: 3135 - DNA, 172 bp, Artificial Sequence; identical to SEQ ID NO: 3134
  Synthetic polynucleotide

SEQ ID NO: 3136 - DNA, 196 bp, Artificial Sequence
  Synthetic polynucleotide
atcatctcaccttgcctcctgagtcatctcaaccgacgcctgcaggtattgcatcatccagatattgcatcatcctcgtattgcatcatccgactattgcatcatccctatattgcatcatccacttattgcatcatcctgctattgcatcatccgtatattgcatcatccggcgcgccatgcttcatcagactct

SEQ ID NO: 3137 - DNA, 196 bp, Artificial Sequence; identical to SEQ ID NO: 3136
  Synthetic polynucleotide

SEQ ID NO: 3138 - DNA, 172 bp, Artificial Sequence
  Synthetic polynucleotide
atcatctcaccttgcctcctggttctcacagtgaggtacctgcaggacccgcatgaagaacccgcatgatcgacccgcatgagacacccgcatgactaacccgcatgaactacccgcatgatgcacccgcatgagtaacccgcatgaggcgcgccatgcttcatcagactct

SEQ ID NO: 3139 - DNA, 172 bp, Artificial Sequence; identical to SEQ ID NO: 3138
  Synthetic polynucleotide

SEQ ID NO: 3140 - DNA, 164 bp, Artificial Sequence
  Synthetic polynucleotide
atcatctcaccttgcctcctgagtacagatgggaatcccctgcaggtctatcctaagatctatcctatcgtctatcctagactctatcctactatctatcctaacttctatcctatgctctatcctagtatctatcctaggcgcgccatgcttcatcagactct

SEQ ID NO: 3141 - DNA, 164 bp, Artificial Sequence; identical to SEQ ID NO: 3140
  Synthetic polynucleotide

SEQ ID NO: 3142 - DNA, 196 bp, Artificial Sequence
  Synthetic polynucleotide
atcatctcaccttgcctcctgagtcgtacggtcattctcctgcagggttaatcattaacagagttaatcattaactcggttaatcattaacgacgttaatcattaacctagttaatcattaacactgttaatcattaactgcgttaatcattaacgtagttaatcattaacggcgcgccatgcttcatcagactct

SEQ ID NO: 3143 - DNA, 196 bp, Artificial Sequence; identical to SEQ ID NO: 3142
  Synthetic polynucleotide

SEQ ID NO: 3144 - DNA, 164 bp, Artificial Sequence
  Synthetic polynucleotide
atcatctcaccttgcctcctgagcctaaggacactcttcctgcaggtgctgacggagatgctgacggtcgtgctgacgggactgctgacggctatgctgacggacttgctgacggtgctgctgacgggtatgctgacggggcgcgccatgcttcatcagactct

SEQ ID NO: 3145 - DNA, 164 bp, Artificial Sequence; identical to SEQ ID NO: 3144
  Synthetic polynucleotide

SEQ ID NO: 3146 - DNA, 164 bp, Artificial Sequence
  Synthetic polynucleotide
atcatctcaccttgcctcctgcgaagagcgacaaagaccctgcaggtgacgtcacagatgacgtcactcgtgacgtcacgactgacgtcacctatgacgtcacacttgacgtcactgctgacgtcacgtatgacgtcacggcgcgccatgcttcatcagactct

SEQ ID NO: 3147 - DNA, 164 bp, Artificial Sequence; identical to SEQ ID NO: 3146
  Synthetic polynucleotide

SEQ ID NO: 3148 - DNA, 190 bp, Artificial Sequence
  Synthetic polynucleotide
atcatctcaccttgcctcctgtcaatctggagcataaccctgcaggtttagcaatattagagatttagcaatattagtcgtttagcaatattaggactttagcaatattagctatttagcaatattagacttttagcaatattagtgctttagcaatattaggtaggcgcgccatgcttcatcagactct

SEQ ID NO: 3149 - DNA, 190 bp, Artificial Sequence; identical to SEQ ID NO: 3148
  Synthetic polynucleotide

SEQ ID NO: 3150 - DNA, 172 bp, Artificial Sequence
  Synthetic polynucleotide
atcatctcaccttgcctcctgatcatgacggttaacgtcctgcaggagcaggtgttagaagcaggtgtttcgagcaggtgttgacagcaggtgttctaagcaggtgttactagcaggtgtttgcagcaggtgttgtaagcaggtgttggcgcgccatgcttcatcagactct

SEQ ID NO: 3151 - DNA, 172 bp, Artificial Sequence; identical to SEQ ID NO: 3150
  Synthetic polynucleotide

SEQ ID NO: 3152 - DNA, 197 bp, Artificial Sequence
  Synthetic polynucleotide
atcatctcaccttgcctcctgagtgcctcgtaacggctcctgcaggaacaatgttattgttagaaacaatgttattgtttcgaacaatgttattgttgacaacaatgttattgttctaaacaatgttattgttactaacaatgttattgtttgcaacaatgttattgttgtaggcgcgccatgcttcatcagactct

SEQ ID NO: 3153 - DNA, 197 bp, Artificial Sequence; identical to SEQ ID NO: 3152
  Synthetic polynucleotide

SEQ ID NO: 3154 - DNA, 172 bp, Artificial Sequence
  Synthetic polynucleotide
atcatctcaccttgcctcctgataacagcccggctccacctgcaggacatccgggtagaacatccgggttcgacatccgggtgacacatccgggtctaacatccgggtactacatccgggttgcacatccgggtgtaacatccgggtggcgcgccatgcttcatcagactct

SEQ ID NO: 3155 - DNA, 172 bp, Artificial Sequence; identical to SEQ ID NO: 3154
  Synthetic polynucleotide

SEQ ID NO: 3156 - DNA, 156 bp, Artificial Sequence
  Synthetic polynucleotide
atcatctcaccttgcctcctgggactttcttccgatttcctgcaggttgggagaagattgggagatcgttgggagagacttgggagactattgggagaactttgggagatgcttgggagagtattgggagaggcgcgccatgcttcatcagactct

SEQ ID NO: 3157 - DNA, 156 bp, Artificial Sequence; identical to SEQ ID NO: 3156
  Synthetic polynucleotide

SEQ ID NO: 3158 - DNA, 197 bp, Artificial Sequence
  Synthetic polynucleotide
atcatctcaccttgcctcctgatgataagaggaagaagcctgcaggttaattaccgttaattacagattaattaccgttaattactcgttaattaccgttaattacgacttaattaccgttaattacctattaattaccgttaattacactttaattaccgttaattactgcggcgcgccatgcttcatcagactct

SEQ ID NO: 3159 - DNA, 197 bp, Artificial Sequence; identical to SEQ ID NO: 3158
  Synthetic polynucleotide

SEQ ID NO: 3160 - DNA, 172 bp, Artificial Sequence
  Synthetic polynucleotide
atcatctcaccttgcctcctggtaccgtaatctttcttcctgcagggtcatgtgatagagtcatgtgattcggtcatgtgatgacgtcatgtgatctagtcatgtgatactgtcatgtgattgcgtcatgtgatgtagtcatgtgatggcgcgccatgcttcatcagactct

SEQ ID NO: 3161 - DNA, 172 bp, Artificial Sequence; identical to SEQ ID NO: 3160
  Synthetic polynucleotide

SEQ ID NO: 3162 - DNA, 164 bp, Artificial Sequence
  Synthetic polynucleotide
atcatctcaccttgcctcctgtagccggagtctaccttcctgcaggacacgtggcagaacacgtggctcgacacgtggcgacacacgtggcctaacacgtggcactacacgtggctgcacacgtggcgtaacacgtggcggcgcgccatgcttcatcagactct

SEQ ID NO: 3163 - DNA, 164 bp, Artificial Sequence; identical to SEQ ID NO: 3162
  Synthetic polynucleotide

SEQ ID NO: 3164 - DNA, 197 bp, Artificial Sequence
  Synthetic polynucleotide
atcatctcaccttgcctcctgtatagatgtttgctggacctgcaggagaacagaatgttctagaagaacagaatgttcttcgagaacagaatgttctgacagaacagaatgttctctaagaacagaatgttctactagaacagaatgttcttgcagaacagaatgttctgtaggcgcgccatgcttcatcagactct

SEQ ID NO: 3165 - DNA, 197 bp, Artificial Sequence; identical to SEQ ID NO: 3164
  Synthetic polynucleotide

SEQ ID NO: 3166 - DNA, 172 bp, Artificial Sequence
  Synthetic polynucleotide
atcatctcaccttgcctcctggctctatcaacaaggtgcctgcaggacatcaaaggagaacatcaaaggtcgacatcaaagggacacatcaaaggctaacatcaaaggactacatcaaaggtgcacatcaaagggtaacatcaaaggggcgcgccatgcttcatcagactct

SEQ ID NO: 3167 - DNA, 172 bp, Artificial Sequence; identical to SEQ ID NO: 3166
  Synthetic polynucleotide

SEQ ID NO: 3168 - DNA, 164 bp, Artificial Sequence
  Synthetic polynucleotide
atcatctcaccttgcctcctgttgatgtgagtggtccccctgcaggacccattaaagaacccattaatcgacccattaagacacccattaactaacccattaaactacccattaatgcacccattaagtaacccattaaggcgcgccatgcttcatcagactct

SEQ ID NO: 3169 - DNA, 164 bp, Artificial Sequence; identical to SEQ ID NO: 3168
  Synthetic polynucleotide

SEQ ID NO: 3170 - DNA, 164 bp, Artificial Sequence
  Synthetic polynucleotide
atcatctcaccttgcctcctgctggatgtgttggtgtacctgcaggccgtcagcaagaccgtcagcatcgccgtcagcagacccgtcagcactaccgtcagcaactccgtcagcatgcccgtcagcagtaccgtcagcaggcgcgccatgcttcatcagactct

SEQ ID NO: 3171 - DNA, 164 bp, Artificial Sequence; identical to SEQ ID NO: 3170
  Synthetic polynucleotide

SEQ ID NO: 3172 - DNA, 185 bp, Artificial Sequence
  Synthetic polynucleotide
atcatctcaccttgcctcctgttacaacacgtggcagacctgcaggtttaattaattaattcagatttaattaattaattctcgtttaattaattaattcgactttaattaattaattcctatttaattaattaattcacttttaattaattaattctgcggcgcgccatgcttcatcagactct

SEQ ID NO: 3173 - DNA, 185 bp, Artificial Sequence; identical to SEQ ID NO: 3172
  Synthetic polynucleotide

SEQ ID NO: 3174 - DNA, 164 bp, Artificial Sequence
  Synthetic polynucleotide
atcatctcaccttgcctcctgtgtaggcctatctctgccctgcaggggtgggcatagaggtgggcattcgggtgggcatgacggtgggcatctaggtgggcatactggtgggcattgcggtgggcatgtaggtgggcatggcgcgccatgcttcatcagactct

SEQ ID NO: 3175 - DNA, 164 bp, Artificial Sequence; identical to SEQ ID NO: 3174
  Synthetic polynucleotide

SEQ ID NO: 3176 - DNA, 164 bp, Artificial Sequence
  Synthetic polynucleotide
atcatctcaccttgcctcctggagtaacccaacatggccctgcaggtgcgggcagagatgcgggcagtcgtgcgggcaggactgcgggcagctatgcgggcagacttgcgggcagtgctgcgggcaggtatgcgggcagggcgcgccatgcttcatcagactct

SEQ ID NO: 3177 - DNA, 164 bp, Artificial Sequence; identical to SEQ ID NO: 3176
  Synthetic polynucleotide

SEQ ID NO: 3178 - DNA, 197 bp, Artificial Sequence
  Synthetic polynucleotide
atcatctcaccttgcctcctgttactggcgacgcccttcctgcaggttggtttcggtttatagattggtttcggtttattcgttggtttcggtttatgacttggtttcggtttatctattggtttcggtttatactttggtttcggtttattgcttggtttcggtttatgtaggcgcgccatgcttcatcagactct

SEQ ID NO: 3179 - DNA, 197 bp, Artificial Sequence; identical to SEQ ID NO: 3178
  Synthetic polynucleotide

SEQ ID NO: 3180 - DNA, 172 bp, Artificial Sequence
  Synthetic polynucleotide
atcatctcaccttgcctcctgacgaggtttataggtaccctgcaggtatgtaaacaagatatgtaaacatcgtatgtaaacagactatgtaaacactatatgtaaacaacttatgtaaacatgctatgtaaacagtatatgtaaacaggcgcgccatgcttcatcagactct

SEQ ID NO: 3181 - DNA, 172 bp, Artificial Sequence; identical to SEQ ID NO: 3180
  Synthetic polynucleotide

SEQ ID NO: 3182 - DNA, 164 bp, Artificial Sequence
  Synthetic polynucleotide
atcatctcaccttgcctcctggacagattccttggactcctgcaggccggaaaaaagaccggaaaaatcgccggaaaaagacccggaaaaactaccggaaaaaactccggaaaaatgcccggaaaaagtaccggaaaaaggcgcgccatgcttcatcagactct

SEQ ID NO: 3183 - DNA, 164 bp, Artificial Sequence; identical to SEQ ID NO: 3182
  Synthetic polynucleotide

SEQ ID NO: 3184 - DNA, 180 bp, Artificial Sequence
  Synthetic polynucleotide
atcatctcaccttgcctcctggattggtcgtttgaggacctgcagggaccacgtggtagagaccacgtggttcggaccacgtggtgacgaccacgtggtctagaccacgtggtactgaccacgtggttgcgaccacgtggtgtagaccacgtggtggcgcgccatgcttcatcagactct

SEQ ID NO: 3185 - DNA, 180 bp, Artificial Sequence; identical to SEQ ID NO: 3184
  Synthetic polynucleotide

SEQ ID NO: 3186 - DNA, 164 bp, Artificial Sequence
  Synthetic polynucleotide
atcatctcaccttgcctcctgtgactttcgtaggcatgcctgcaggagaacaatgagaagaacaatgtcgagaacaatggacagaacaatgctaagaacaatgactagaacaatgtgcagaacaatggtaagaacaatgggcgcgccatgcttcatcagactct

SEQ ID NO: 3187 - DNA, 164 bp, Artificial Sequence; identical to SEQ ID NO: 3186
  Synthetic polynucleotide

SEQ ID NO: 3188 - DNA, 197 bp, Artificial Sequence
  Synthetic polynucleotide
atcatctcaccttgcctcctggcggtactatagaaactcctgcaggttggccccgccccctagattggccccgcccccttcgttggccccgccccctgacttggccccgccccctctattggccccgccccctactttggccccgcccccttgcttggccccgccccctgtaggcgcgccatgcttcatcagactct

SEQ ID NO: 3189 - DNA, 197 bp, Artificial Sequence; identical to SEQ ID NO: 3188
  Synthetic polynucleotide

SEQ ID NO: 3190 - DNA, 156 bp, Artificial Sequence
  Synthetic polynucleotide
atcatctcaccttgcctcctgccaccatatttcggcgtcctgcaggcaaggtcaagacaaggtcatcgcaaggtcagaccaaggtcactacaaggtcaactcaaggtcatgccaaggtcagtacaaggtcaggcgcgccatgcttcatcagactct

SEQ ID NO: 3191 - DNA, 156 bp, Artificial Sequence; identical to SEQ ID NO: 3190
  Synthetic polynucleotide

SEQ ID NO: 3192 - DNA, 190 bp, Artificial Sequence
  Synthetic polynucleotide
atcatctcaccttgcctcctggttcctcatccatccaacctgcaggtgctttctaggaaaagatgctttctaggaaatcgtgctttctaggaaagactgctttctaggaaactatgctttctaggaaaacttgctttctaggaaatgctgctttctaggaaagtaggcgcgccatgcttcatcagactct

SEQ ID NO: 3193 - DNA, 190 bp, Artificial Sequence; identical to SEQ ID NO: 3192
  Synthetic polynucleotide

SEQ ID NO: 3194 - DNA, 190 bp, Artificial Sequence
  Synthetic polynucleotide
atcatctcaccttgcctcctgggtatgctttgagtcttcctgcaggtaagaacaatgggaagataagaacaatgggatcgtaagaacaatgggagactaagaacaatgggactataagaacaatgggaacttaagaacaatgggatgctaagaacaatgggagtaggcgcgccatgcttcatcagactct

SEQ ID NO: 3195 - DNA, 190 bp, Artificial Sequence; identical to SEQ ID NO: 3194
  Synthetic polynucleotide

SEQ ID NO: 3196 - DNA, 197 bp, Artificial Sequence
  Synthetic polynucleotide
atcatctcaccttgcctcctggaattaccggaccttaacctgcaggccggaagcggaagtgagaccggaagcggaagtgtcgccggaagcggaagtggacccggaagcggaagtgctaccggaagcggaagtgactccggaagcggaagtgtgcccggaagcggaagtggtaggcgcgccatgcttcatcagactct

SEQ ID NO: 3197 - DNA, 197 bp, Artificial Sequence; identical to SEQ ID NO: 3196
  Synthetic polynucleotide

SEQ ID NO: 3198 - DNA, 185 bp, Artificial Sequence
  Synthetic polynucleotide
atcatctcaccttgcctcctgatgatcgccttaccgtccctgcaggcaggtgacacctgacaagacaggtgacacctgacatcgcaggtgacacctgacagaccaggtgacacctgacactacaggtgacacctgacaactcaggtgacacctgacatgcggcgcgccatgcttcatcagactct

SEQ ID NO: 3199 - DNA, 185 bp, Artificial Sequence; identical to SEQ ID NO: 3198
  Synthetic polynucleotide

SEQ ID NO: 3200 - DNA, 156 bp, Artificial Sequence
  Synthetic polynucleotide
atcatctcaccttgcctcctgctgatgcatctgattagcctgcaggtgtaaacaagatgtaaacatcgtgtaaacagactgtaaacactatgtaaacaacttgtaaacatgctgtaaacagtatgtaaacaggcgcgccatgcttcatcagactct

SEQ ID NO: 3201 - DNA, 156 bp, Artificial Sequence; identical to SEQ ID NO: 3200
  Synthetic polynucleotide

SEQ ID NO: 3202 - DNA, 191 bp, Artificial Sequence
  Synthetic polynucleotide
atcatctcaccttgcctcctgagtcgatcgctggttcccctgcaggtcaggggtcaaaggtcatccgagatcaggggtcaaaggtcatccgtcgtcaggggtcaaaggtcatccggactcaggggtcaaaggtcatccgctatcaggggtcaaaggtcatccgactggcgcgccatgcttcatcagactct

SEQ ID NO: 3203 - DNA, 191 bp, Artificial Sequence; identical to SEQ ID NO: 3202
  Synthetic polynucleotide

SEQ ID NO: 3204 - DNA, 200 bp, Artificial Sequence
  Synthetic polynucleotide
atcatctcaccttgcctcctgtccggactatcagtggtcctgcaggtaaaggtcaaaggtcaacgagataaaggtcaaaggtcaacgtcgtaaaggtcaaaggtcaacggactaaaggtcaaaggtcaacgctataaaggtcaaaggtcaacgacttaaaggtcaaaggtcaacgggcgcgccatgcttcatcagactct

SEQ ID NO: 3205 - DNA, 200 bp, Artificial Sequence; identical to SEQ ID NO: 3204
  Synthetic polynucleotide

SEQ ID NO: 3206 - DNA, 156 bp, Artificial Sequence
  Synthetic polynucleotide
atcatctcaccttgcctcctgtgattgggctgaacttccctgcaggcacttaagagacacttaagtcgcacttaaggaccacttaagctacacttaagactcacttaagtgccacttaaggtacacttaagggcgcgccatgcttcatcagactct

SEQ ID NO: 3207 - DNA, 156 bp, Artificial Sequence; identical to SEQ ID NO: 3206
  Synthetic polynucleotide

SEQ ID NO: 3208 - DNA, 197 bp, Artificial Sequence
  Synthetic polynucleotide
atcatctcaccttgcctcctgacgcagcggattgtatacctgcaggatcaattgcattgatagaatcaattgcattgattcgatcaattgcattgatgacatcaattgcattgatctaatcaattgcattgatactatcaattgcattgattgcatcaattgcattgatgtaggcgcgccatgcttcatcagactct

SEQ ID NO: 3209 - DNA, 197 bp, Artificial Sequence; identical to SEQ ID NO: 3208
  Synthetic polynucleotide

SEQ ID NO: 3210 - DNA, 185 bp, Artificial Sequence
  Synthetic polynucleotide
atcatctcaccttgcctcctgactctagacagtggtgacctgcaggtcgatgacgtcatcgtagatcgatgacgtcatcgttcgtcgatgacgtcatcgtgactcgatgacgtcatcgtctatcgatgacgtcatcgtacttcgatgacgtcatcgttgcggcgcgccatgcttcatcagactct

SEQ ID NO: 3211 - DNA, 185 bp, Artificial Sequence; identical to SEQ ID NO: 3210
  Synthetic polynucleotide

SEQ ID NO: 3212 - DNA, 164 bp, Artificial Sequence
  Synthetic polynucleotide
atcatctcaccttgcctcctgcgtcttggacattacgacctgcaggtcattatcgagatcattatcgtcgtcattatcggactcattatcgctatcattatcgacttcattatcgtgctcattatcggtatcattatcgggcgcgccatgcttcatcagactct

SEQ ID NO: 3213 - DNA, 164 bp, Artificial Sequence; identical to SEQ ID NO: 3212
  Synthetic polynucleotide

SEQ ID NO: 3214 - DNA, 164 bp, Artificial Sequence
  Synthetic polynucleotide
atcatctcaccttgcctcctgggaaagcactaactgcgcctgcaggatttgatacagaatttgatactcgatttgatacgacatttgatacctaatttgatacactatttgatactgcatttgatacgtaatttgatacggcgcgccatgcttcatcagactct

SEQ ID NO: 3215 - DNA, 164 bp, Artificial Sequence; identical to SEQ ID NO: 3214
  Synthetic polynucleotide

SEQ ID NO: 3216 - DNA, 172 bp, Artificial Sequence
  Synthetic polynucleotide
atcatctcaccttgcctcctgccgccgattcgtagttacctgcagggccagttgacagagccagttgactcggccagttgacgacgccagttgacctagccagttgacactgccagttgactgcgccagttgacgtagccagttgacggcgcgccatgcttcatcagactct

SEQ ID NO: 3217 - DNA, 172 bp, Artificial Sequence; identical to SEQ ID NO: 3216
  Synthetic polynucleotide

SEQ ID NO: 3218 - DNA, 185 bp, Artificial Sequence
  Synthetic polynucleotide
atcatctcaccttgcctcctgtgtacgatcagtcggaacctgcaggaacactgaacattgttagaaacactgaacattgtttcgaacactgaacattgttgacaacactgaacattgttctaaacactgaacattgttactaacactgaacattgtttgcggcgcgccatgcttcatcagactct

SEQ ID NO: 3219 - DNA, 185 bp, Artificial Sequence; identical to SEQ ID NO: 3218
  Synthetic polynucleotide

SEQ ID NO: 3220 - DNA, 156 bp, Artificial Sequence
  Synthetic polynucleotide
atcatctcaccttgcctcctggtaacctgttagaggatcctgcaggaagcggaaagaaagcggaatcgaagcggaagacaagcggaactaaagcggaaactaagcggaatgcaagcggaagtaaagcggaaggcgcgccatgcttcatcagactct

SEQ ID NO: 3221 - DNA, 156 bp, Artificial Sequence; identical to SEQ ID NO: 3220
  Synthetic polynucleotide

SEQ ID NO: 3222 - DNA, 172 bp, Artificial Sequence
  Synthetic polynucleotide
atcatctcaccttgcctcctgatcgcagaaagcaagtacctgcaggaacatggcggagaaacatggcggtcgaacatggcgggacaacatggcggctaaacatggcggactaacatggcggtgcaacatggcgggtaaacatggcggggcgcgccatgcttcatcagactct

SEQ ID NO: 3223 - DNA, 172 bp, Artificial Sequence; identical to SEQ ID NO: 3222
  Synthetic polynucleotide

SEQ ID NO: 3224 - DNA, 172 bp, Artificial Sequence
  Synthetic polynucleotide
atcatctcaccttgcctcctgggtttaagtcggtcagtcctgcaggcatcaaagggagacatcaaagggtcgcatcaaaggggaccatcaaagggctacatcaaagggactcatcaaagggtgccatcaaaggggtacatcaaagggggcgcgccatgcttcatcagactct

SEQ ID NO: 3225 - DNA, 172 bp, Artificial Sequence; identical to SEQ ID NO: 3224
  Synthetic polynucleotide

SEQ ID NO: 3226 - DNA, 196 bp, Artificial Sequence
  Synthetic polynucleotide
atcatctcaccttgcctcctgtaatagtgttagctcaccctgcaggataaacaaacagaagaataaacaaacagatcgataaacaaacagagacataaacaaacagactaataaacaaacagaactataaacaaacagatgcataaacaaacagagtaataaacaaacagaggcgcgccatgcttcatcagactct

SEQ ID NO: 3227 - DNA, 196 bp, Artificial Sequence; identical to SEQ ID NO: 3226
  Synthetic polynucleotide

SEQ ID NO: 3228 - DNA, 172 bp, Artificial Sequence
  Synthetic polynucleotide
atcatctcaccttgcctcctgcaagaatagttcatcagcctgcaggcgcccccgcaagacgcccccgcatcgcgcccccgcagaccgcccccgcactacgcccccgcaactcgcccccgcatgccgcccccgcagtacgcccccgcaggcgcgccatgcttcatcagactct

SEQ ID NO: 3229 - DNA, 172 bp, Artificial Sequence; identical to SEQ ID NO: 3228
  Synthetic polynucleotide

SEQ ID NO: 3230 - DNA, 172 bp, Artificial Sequence
  Synthetic polynucleotide
atcatctcaccttgcctcctgaccgatcagcagatgatcctgcaggagcagctggaagaagcagctggatcgagcagctggagacagcagctggactaagcagctggaactagcagctggatgcagcagctggagtaagcagctggaggcgcgccatgcttcatcagactct

SEQ ID NO: 3231 - DNA, 172 bp, Artificial Sequence; identical to SEQ ID NO: 3230
  Synthetic polynucleotide

SEQ ID NO: 3232 - DNA, 156 bp, Artificial Sequence
  Synthetic polynucleotide
atcatctcaccttgcctcctgaaaccgatgaactcaagcctgcagggtactaatagagtactaattcggtactaatgacgtactaatctagtactaatactgtactaattgcgtactaatgtagtactaatggcgcgccatgcttcatcagactct

SEQ ID NO: 3233 - DNA, 156 bp, Artificial Sequence; identical to SEQ ID NO: 3232
  Synthetic polynucleotide

SEQ ID NO: 3234 - DNA, 164 bp, Artificial Sequence
  Synthetic polynucleotide
atcatctcaccttgcctcctgcaccgcaataagactagcctgcaggagcgattaaagaagcgattaatcgagcgattaagacagcgattaactaagcgattaaactagcgattaatgcagcgattaagtaagcgattaaggcgcgccatgcttcatcagactct

SEQ ID NO: 3235 - DNA, 164 bp, Artificial Sequence; identical to SEQ ID NO: 3234
  Synthetic polynucleotide

SEQ ID NO: 3236 - DNA, 172 bp, Artificial Sequence
  Synthetic polynucleotide
atcatctcaccttgcctcctgcttactatccgcttatgcctgcaggccaactgccaagaccaactgccatcgccaactgccagacccaactgccactaccaactgccaactccaactgccatgcccaactgccagtaccaactgccaggcgcgccatgcttcatcagactct

SEQ ID NO: 3237 - DNA, 172 bp, Artificial Sequence; identical to SEQ ID NO: 3236
  Synthetic polynucleotide

SEQ ID NO: 3238 - DNA, 140 bp, Artificial Sequence
  Synthetic polynucleotide
atcatctcaccttgcctcctgcttcgcagggttaagaacctgcaggcgcgccagacgcgcctcgcgcgccgaccgcgccctacgcgccactcgcgcctgccgcgccgtacgcgccggcgcgccatgcttcatcagactct

SEQ ID NO: 3239 - DNA, 140 bp, Artificial Sequence; identical to SEQ ID NO: 3238
  Synthetic polynucleotide

SEQ ID NO: 3240 - DNA, 156 bp, Artificial Sequence
  Synthetic polynucleotide
atcatctcaccttgcctcctggtcttaacgccgttgaacctgcaggaggaagtcagaaggaagtctcgaggaagtcgacaggaagtcctaaggaagtcactaggaagtctgcaggaagtcgtaaggaagtcggcgcgccatgcttcatcagactct

SEQ ID NO: 3241 - DNA, 156 bp, Artificial Sequence; identical to SEQ ID NO: 3240
  Synthetic polynucleotide

SEQ ID NO: 3242 - DNA, 140 bp, Artificial Sequence
  Synthetic polynucleotide
atcatctcaccttgcctcctgagcgtacgacagcctgtcctgcaggttattaagattattatcgttattagacttattactattattaactttattatgcttattagtattattaggcgcgccatgcttcatcagactct

SEQ ID NO: 3243 - DNA, 140 bp, Artificial Sequence; identical to SEQ ID NO: 3242
  Synthetic polynucleotide

SEQ ID NO: 3244 - DNA, 180 bp, Artificial Sequence
  Synthetic polynucleotide
atcatctcaccttgcctcctgcgtttcgtcccatacgccctgcagggccgccattttagagccgccatttttcggccgccattttgacgccgccattttctagccgccattttactgccgccatttttgcgccgccattttgtagccgccattttggcgcgccatgcttcatcagactct

SEQ ID NO: 3245 - DNA, 180 bp, Artificial Sequence; identical to SEQ ID NO: 3244
  Synthetic polynucleotide

SEQ ID NO: 3246 - DNA, 164 bp, Artificial Sequence
  Synthetic polynucleotide
atcatctcaccttgcctcctgacttaacatgccattctcctgcaggaaaacaaaaagaaaaacaaaatcgaaaacaaaagacaaaacaaaactaaaaacaaaaactaaaacaaaatgcaaaacaaaagtaaaaacaaaaggcgcgccatgcttcatcagactct

SEQ ID NO: 3247 - DNA, 164 bp, Artificial Sequence; identical to SEQ ID NO: 3246
  Synthetic polynucleotide

SEQ ID NO: 3248 - DNA, 172 bp, Artificial Sequence
  Synthetic polynucleotide
atcatctcaccttgcctcctgcaacctatgggagcaagcctgcaggccatccatcaagaccatccatcatcgccatccatcagacccatccatcactaccatccatcaactccatccatcatgcccatccatcagtaccatccatcaggcgcgccatgcttcatcagactct

SEQ ID NO: 3249 - DNA, 172 bp, Artificial Sequence; identical to SEQ ID NO: 3248
  Synthetic polynucleotide

SEQ ID NO: 3250 - DNA, 200 bp, Artificial Sequence
  Synthetic polynucleotide
atcatctcaccttgcctcctgcccaaatatttccaccccctgcaggctcttcctccctcctcttctcctctcctctagactcttcctccctcctcttctcctctcctcttcgctcttcctccctcctcttctcctctcctctgacctcttcctccctcctcttctcctctcctctggcgcgccatgcttcatcagactct

SEQ ID NO: 3251 - DNA, 200 bp, Artificial Sequence; identical to SEQ ID NO: 3250
  Synthetic polynucleotide

SEQ ID NO: 3252 - DNA, 190 bp, Artificial Sequence
  Synthetic polynucleotide
atcatctcaccttgcctcctgatgtcggcaacaggcctcctgcaggaaaagtaggtcagaagaaaaagtaggtcagatcgaaaagtaggtcagagacaaaagtaggtcagactaaaaagtaggtcagaactaaaagtaggtcagatgcaaaagtaggtcagagtaggcgcgccatgcttcatcagactct

SEQ ID NO: 3253 - DNA, 190 bp, Artificial Sequence; identical to SEQ ID NO: 3252
  Synthetic polynucleotide

SEQ ID NO: 3254 - DNA, 190 bp, Artificial Sequence
  Synthetic polynucleotide
atcatctcaccttgcctcctgctgcgctacaagggtcacctgcaggccacctgccgcaggagaccacctgccgcaggtcgccacctgccgcagggacccacctgccgcaggctaccacctgccgcaggactccacctgccgcaggtgcccacctgccgcagggtaggcgcgccatgcttcatcagactct

SEQ ID NO: 3255 - DNA, 190 bp, Artificial Sequence; identical to SEQ ID NO: 3254
  Synthetic polynucleotide

SEQ ID NO: 3256 - DNA, 164 bp, Artificial Sequence
  Synthetic polynucleotide
atcatctcaccttgcctcctgctcaggcttgttccattcctgcaggggtcattaaagaggtcattaatcgggtcattaagacggtcattaactaggtcattaaactggtcattaatgcggtcattaagtaggtcattaaggcgcgccatgcttcatcagactct

SEQ ID NO: 3257 - DNA, 164 bp, Artificial Sequence; identical to SEQ ID NO: 3256
  Synthetic polynucleotide

SEQ ID NO: 3258 - DNA, 190 bp, Artificial Sequence
  Synthetic polynucleotide
atcatctcaccttgcctcctggaaagaaatgcggactgcctgcaggcccccccgggggtgagacccccccgggggtgtcgcccccccgggggtggaccccccccgggggtgctacccccccgggggtgactcccccccgggggtgtgccccccccgggggtggtaggcgcgccatgcttcatcagactct

SEQ ID NO: 3259 - DNA, 190 bp, Artificial Sequence; identical to SEQ ID NO: 3258
  Synthetic polynucleotide

SEQ ID NO: 3260 - DNA, 164 bp, Artificial Sequence
  Synthetic polynucleotide
atcatctcaccttgcctcctgacgcatttcggtattaccctgcaggcaggaatttagacaggaattttcgcaggaatttgaccaggaatttctacaggaatttactcaggaattttgccaggaatttgtacaggaatttggcgcgccatgcttcatcagactct

SEQ ID NO: 3261 - DNA, 164 bp, Artificial Sequence; identical to SEQ ID NO: 3260
  Synthetic polynucleotide

SEQ ID NO: 3262 - DNA, 191 bp, Artificial Sequence
  Synthetic polynucleotide
atcatctcaccttgcctcctgttaagacctggaggctgcctgcaggaggtcactcaaaggtcaagaaggtcactcaaaggtcatcgaggtcactcaaaggtcagacaggtcactcaaaggtcactaaggtcactcaaaggtcaactaggtcactcaaaggtcatgcggcgcgccatgcttcatcagactct

SEQ ID NO: 3263 - DNA, 191 bp, Artificial Sequence; identical to SEQ ID NO: 3262
  Synthetic polynucleotide

SEQ ID NO: 3264 - DNA, 164 bp, Artificial Sequence
  Synthetic polynucleotide
atcatctcaccttgcctcctgtctgggttattaaggaacctgcagggcagctgtcagagcagctgtctcggcagctgtcgacgcagctgtcctagcagctgtcactgcagctgtctgcgcagctgtcgtagcagctgtcggcgcgccatgcttcatcagactct

SEQ ID NO: 3265 - DNA, 164 bp, Artificial Sequence; identical to SEQ ID NO: 3264
  Synthetic polynucleotide

SEQ ID NO: 3266 - DNA, 156 bp, Artificial Sequence
  Synthetic polynucleotide
atcatctcaccttgcctcctgtaagcggaaacctaacacctgcagggccaccagagagccaccagtcggccaccaggacgccaccagctagccaccagactgccaccagtgcgccaccaggtagccaccagggcgcgccatgcttcatcagactct

SEQ ID NO: 3267 - DNA, 156 bp, Artificial Sequence; identical to SEQ ID NO: 3266
  Synthetic polynucleotide

SEQ ID NO: 3268 - DNA, 172 bp, Artificial Sequence
  Synthetic polynucleotide
atcatctcaccttgcctcctggtgctgaaccctgaattcctgcaggagtcacgtgaagaagtcacgtgatcgagtcacgtgagacagtcacgtgactaagtcacgtgaactagtcacgtgatgcagtcacgtgagtaagtcacgtgaggcgcgccatgcttcatcagactct

SEQ ID NO: 3269 - DNA, 172 bp, Artificial Sequence; identical to SEQ ID NO: 3268
  Synthetic polynucleotide

SEQ ID NO: 3270 - DNA, 148 bp, Artificial Sequence
  Synthetic polynucleotide
atcatctcaccttgcctcctgacggtctgataggaccgcctgcagggaaatcaagagaaatcatcggaaatcagacgaaatcactagaaatcaactgaaatcatgcgaaatcagtagaaatcaggcgcgccatgcttcatcagactct

SEQ ID NO: 3271 - DNA, 148 bp, Artificial Sequence; identical to SEQ ID NO: 3270
  Synthetic polynucleotide

SEQ ID NO: 3272 - DNA, 185 bp, Artificial Sequence
  Synthetic polynucleotide
atcatctcaccttgcctcctgatacgcgcagtgtaatgcctgcagggcgctagcggacgttaagagcgctagcggacgttatcggcgctagcggacgttagacgcgctagcggacgttactagcgctagcggacgttaactgcgctagcggacgttatgcggcgcgccatgcttcatcagactct

SEQ ID NO: 3273 - DNA, 185 bp, Artificial Sequence; identical to SEQ ID NO: 3272
  Synthetic polynucleotide

SEQ ID NO: 3274 - DNA, 180 bp, Artificial Sequence
  Synthetic polynucleotide
atcatctcaccttgcctcctgatcatgggcagggctctcctgcaggagcacgtggccagaagcacgtggcctcgagcacgtggccgacagcacgtggccctaagcacgtggccactagcacgtggcctgcagcacgtggccgtaagcacgtggccggcgcgccatgcttcatcagactct

SEQ ID NO: 3275 - DNA, 180 bp, Artificial Sequence; identical to SEQ ID NO: 3274
  Synthetic polynucleotide

SEQ ID NO: 3276 - DNA, 188 bp, Artificial Sequence
  Synthetic polynucleotide
atcatctcaccttgcctcctgcttccatcaaatattggcctgcaggtatgtttacattagatatgtttacatttcgtatgtttacattgactatgtttacattctatatgtttacattacttatgtttacatttgctatgtttacattgtatatgtttacattggcgcgccatgcttcatcagactct

SEQ ID NO: 3277 - DNA, 188 bp, Artificial Sequence; identical to SEQ ID NO: 3276
  Synthetic polynucleotide

SEQ ID NO: 3278 - DNA, 172 bp, Artificial Sequence
  Synthetic polynucleotide
atcatctcaccttgcctcctgctccctcgtacgaatcccctgcaggccttagcaacagaccttagcaactcgccttagcaacgacccttagcaacctaccttagcaacactccttagcaactgcccttagcaacgtaccttagcaacggcgcgccatgcttcatcagactct

SEQ ID NO: 3279 - DNA, 172 bp, Artificial Sequence; identical to SEQ ID NO: 3278
  Synthetic polynucleotide

SEQ ID NO: 3280 - DNA, 172 bp, Artificial Sequence
  Synthetic polynucleotide
atcatctcaccttgcctcctgggcttatacaacgccaccctgcaggtgcatatcaaagatgcatatcaatcgtgcatatcaagactgcatatcaactatgcatatcaaacttgcatatcaatgctgcatatcaagtatgcatatcaaggcgcgccatgcttcatcagactct

SEQ ID NO: 3281 - DNA, 172 bp, Artificial Sequence; identical to SEQ ID NO: 3280
  Synthetic polynucleotide

SEQ ID NO: 3282 - DNA, 172 bp, Artificial Sequence
  Synthetic polynucleotide
atcatctcaccttgcctcctgcgggccacattcatttacctgcagggtcaactggcagagtcaactggctcggtcaactggcgacgtcaactggcctagtcaactggcactgtcaactggctgcgtcaactggcgtagtcaactggcggcgcgccatgcttcatcagactct

SEQ ID NO: 3283 - DNA, 172 bp, Artificial Sequence; identical to SEQ ID NO: 3282
  Synthetic polynucleotide

SEQ ID NO: 3284 - DNA, 196 bp, Artificial Sequence
  Synthetic polynucleotide
atcatctcaccttgcctcctgggtgaactgttgcctaccctgcaggatatattcatgagagaatatattcatgagtcgatatattcatgaggacatatattcatgagctaatatattcatgagactatatattcatgagtgcatatattcatgaggtaatatattcatgagggcgcgccatgcttcatcagactct

SEQ ID NO: 3285 - DNA, 196 bp, Artificial Sequence; identical to SEQ ID NO: 3284
  Synthetic polynucleotide

SEQ ID NO: 3286 - DNA, 180 bp, Artificial Sequence
  Synthetic polynucleotide
atcatctcaccttgcctcctgcgcagcatacgatcaaacctgcaggagtcacgatttagaagtcacgattttcgagtcacgatttgacagtcacgatttctaagtcacgatttactagtcacgattttgcagtcacgatttgtaagtcacgatttggcgcgccatgcttcatcagactct

SEQ ID NO: 3287 - DNA, 180 bp, Artificial Sequence; identical to SEQ ID NO: 3286
  Synthetic polynucleotide

SEQ ID NO: 3288 - DNA, 180 bp, Artificial Sequence
  Synthetic polynucleotide
atcatctcaccttgcctcctgtatagccaacaaccgctcctgcaggtttcctggaaaagatttcctggaaatcgtttcctggaaagactttcctggaaactatttcctggaaaacttttcctggaaatgctttcctggaaagtatttcctggaaaggcgcgccatgcttcatcagactct

SEQ ID NO: 3289 - DNA, 180 bp, Artificial Sequence; identical to SEQ ID NO: 3288
  Synthetic polynucleotide

SEQ ID NO: 3290 - DNA, 188 bp, Artificial Sequence
  Synthetic polynucleotide
atcatctcaccttgcctcctgataagcaaacgacattgcctgcaggtggcacgtgccgagatggcacgtgccgtcgtggcacgtgccggactggcacgtgccgctatggcacgtgccgacttggcacgtgccgtgctggcacgtgccggtatggcacgtgccgggcgcgccatgcttcatcagactct

SEQ ID NO: 3291 - DNA, 188 bp, Artificial Sequence; identical to SEQ ID NO: 3290
  Synthetic polynucleotide

SEQ ID NO: 3292 - DNA, 200 bp, Artificial Sequence
  Synthetic polynucleotide
atcatctcaccttgcctcctgaacgattggaacgcgttcctgcaggggggggggagtggagtattggaaatttttcagaggggggggagtggagtattggaaatttttctcgggggggggagtggagtattggaaatttttcgacggggggggagtggagtattggaaatttttcggcgcgccatgcttcatcagactct

SEQ ID NO: 3293 - DNA, 200 bp, Artificial Sequence; identical to SEQ ID NO: 3292
  Synthetic polynucleotide

SEQ ID NO: 3294 - DNA, 140 bp, Artificial Sequence
  Synthetic polynucleotide
atcatctcaccttgcctcctggttagacccagcgttaacctgcaggtaataaagataataatcgtaataagactaataactataataaacttaataatgctaataagtataataaggcgcgccatgcttcatcagactct

SEQ ID NO: 3295 - DNA, 140 bp, Artificial Sequence; identical to SEQ ID NO: 3294
  Synthetic polynucleotide

SEQ ID NO: 3296 - DNA, 188 bp, Artificial Sequence
  Synthetic polynucleotide
atcatctcaccttgcctcctgtcgtgataagacggtcccctgcaggtggcacgtgccaagatggcacgtgccatcgtggcacgtgccagactggcacgtgccactatggcacgtgccaacttggcacgtgccatgctggcacgtgccagtatggcacgtgccaggcgcgccatgcttcatcagactct

SEQ ID NO: 3297 - DNA, 188 bp, Artificial Sequence; identical to SEQ ID NO: 3296
  Synthetic polynucleotide

SEQ ID NO: 3298 - DNA, 196 bp, Artificial Sequence
  Synthetic polynucleotide
atcatctcaccttgcctcctgacgaggtgcctataactcctgcaggcatgactcagcagagacatgactcagcagtcgcatgactcagcaggaccatgactcagcagctacatgactcagcagactcatgactcagcagtgccatgactcagcaggtacatgactcagcagggcgcgccatgcttcatcagactct

SEQ ID NO: 3299 - DNA, 196 bp, Artificial Sequence; identical to SEQ ID NO: 3298
  Synthetic polynucleotide

SEQ ID NO: 3300 - DNA, 180 bp, Artificial Sequence
  Synthetic polynucleotide
atcatctcaccttgcctcctggccatatacgggtcctgcctgcaggaaacaatggaaagaaaacaatggaatcgaaacaatggaagacaaacaatggaactaaaacaatggaaactaaacaatggaatgcaaacaatggaagtaaaacaatggaaggcgcgccatgcttcatcagactct

SEQ ID NO: 3301 - DNA, 180 bp, Artificial Sequence; identical to SEQ ID NO: 3300
  Synthetic polynucleotide

SEQ ID NO: 3302 - DNA, 197 bp, Artificial Sequence
  Synthetic polynucleotide
atcatctcaccttgcctcctgatcgactctgtctggcacctgcaggatcgataacctgatcgatagaatcgataacctgatcgattcgatcgataacctgatcgatgacatcgataacctgatcgatctaatcgataacctgatcgatactatcgataacctgatcgattgcggcgcgccatgcttcatcagactct

SEQ ID NO: 3303 - DNA, 197 bp, Artificial Sequence; identical to SEQ ID NO: 3302
  Synthetic polynucleotide

SEQ ID NO: 3304 - DNA, 185 bp, Artificial Sequence
  Synthetic polynucleotide
atcatctcaccttgcctcctgattggtgcctaagctgccctgcaggccattgtttacttaagagaccattgtttacttaagtcgccattgtttacttaaggacccattgtttacttaagctaccattgtttacttaagactccattgtttacttaagtgcggcgcgccatgcttcatcagactct

SEQ ID NO: 3305 - DNA, 185 bp, Artificial Sequence; identical to SEQ ID NO: 3304
  Synthetic polynucleotide

SEQ ID NO: 3306 - DNA, 180 bp, Artificial Sequence
  Synthetic polynucleotide
atcatctcaccttgcctcctgaagtggtcctcctctaccctgcaggctgtggtttgtagactgtggtttgttcgctgtggtttgtgacctgtggtttgtctactgtggtttgtactctgtggtttgttgcctgtggtttgtgtactgtggtttgtggcgcgccatgcttcatcagactct

SEQ ID NO: 3307 - DNA, 180 bp, Artificial Sequence; identical to SEQ ID NO: 3306
  Synthetic polynucleotide

SEQ ID NO: 3308 - DNA, 188 bp, Artificial Sequence
  Synthetic polynucleotide
atcatctcaccttgcctcctgcggttgaccattgtctccctgcaggccttcttccttaagaccttcttccttatcgccttcttccttagacccttcttccttactaccttcttccttaactccttcttccttatgcccttcttccttagtaccttcttccttaggcgcgccatgcttcatcagactct

SEQ ID NO: 3309 - DNA, 188 bp, Artificial Sequence; identical to SEQ ID NO: 3308
  Synthetic polynucleotide

SEQ ID NO: 3310 - DNA, 190 bp, Artificial Sequence
  Synthetic polynucleotide
atcatctcaccttgcctcctgagatcgtttacaacccacctgcaggtaattgcttaattaagataattgcttaattatcgtaattgcttaattagactaattgcttaattactataattgcttaattaacttaattgcttaattatgctaattgcttaattagtaggcgcgccatgcttcatcagactct

SEQ ID NO: 3311 - DNA, 190 bp, Artificial Sequence; identical to SEQ ID NO: 3310
  Synthetic polynucleotide

SEQ ID NO: 3312 - DNA, 191 bp, Artificial Sequence
  Synthetic polynucleotide
atcatctcaccttgcctcctgggtaattgtgcctcaaccctgcaggaatatacatgtaatattagaaatatacatgtaatatttcgaatatacatgtaatattgacaatatacatgtaatattctaaatatacatgtaatattactaatatacatgtaatatttgcggcgcgccatgcttcatcagactct

SEQ ID NO: 3313 - DNA, 191 bp, Artificial Sequence; identical to SEQ ID NO: 3312
  Synthetic polynucleotide

SEQ ID NO: 3314 - DNA, 172 bp, Artificial Sequence
  Synthetic polynucleotide
atcatctcaccttgcctcctggaacggagtccacaagtcctgcaggaaggaaatgaagaaaggaaatgatcgaaggaaatgagacaaggaaatgactaaaggaaatgaactaaggaaatgatgcaaggaaatgagtaaaggaaatgaggcgcgccatgcttcatcagactct

SEQ ID NO: 3315 - DNA, 172 bp, Artificial Sequence; identical to SEQ ID NO: 3314
  Synthetic polynucleotide

SEQ ID NO: 3316 - DNA, 190 bp, Artificial Sequence
  Synthetic polynucleotide
atcatctcaccttgcctcctggggtagcgccataaagacctgcaggggggtcatgaccccagaggggtcatgacccctcgggggtcatgaccccgacggggtcatgaccccctaggggtcatgaccccactggggtcatgacccctgcggggtcatgaccccgtaggcgcgccatgcttcatcagactct

SEQ ID NO: 3317 - DNA, 190 bp, Artificial Sequence; identical to SEQ ID NO: 3316
  Synthetic polynucleotide

SEQ ID NO: 3318 - DNA, 185 bp, Artificial Sequence
  Synthetic polynucleotide
atcatctcaccttgcctcctgttgatctcagccacggccctgcagggtattgacaggtaattagagtattgacaggtaatttcggtattgacaggtaattgacgtattgacaggtaattctagtattgacaggtaattactgtattgacaggtaatttgcggcgcgccatgcttcatcagactct

SEQ ID NO: 3319 - DNA, 185 bp, Artificial Sequence; identical to SEQ ID NO: 3318
  Synthetic polynucleotide

SEQ ID NO: 3320 - DNA, 190 bp, Artificial Sequence
  Synthetic polynucleotide
atcatctcaccttgcctcctgagcttcttgcgataaggcctgcaggaaaaaatcaataatagaaaaaaatcaataattcgaaaaaatcaataatgacaaaaaatcaataatctaaaaaaatcaataatactaaaaaatcaataattgcaaaaaatcaataatgtaggcgcgccatgcttcatcagactct

SEQ ID NO: 3321 - DNA, 190 bp, Artificial Sequence; identical to SEQ ID NO: 3320
  Synthetic polynucleotide

SEQ ID NO: 3322 - DNA, 196 bp, Artificial Sequence
  Synthetic polynucleotide
atcatctcaccttgcctcctgtagagcagtaatacaagcctgcagggattattctcaggagagattattctcaggtcggattattctcagggacgattattctcaggctagattattctcaggactgattattctcaggtgcgattattctcagggtagattattctcaggggcgcgccatgcttcatcagactct

SEQ ID NO: 3323 - DNA, 196 bp, Artificial Sequence; identical to SEQ ID NO: 3322
  Synthetic polynucleotide

SEQ ID NO: 3324 - DNA, 197 bp, Artificial Sequence
  Synthetic polynucleotide
atcatctcaccttgcctcctgactgttctcgggaatggcctgcaggctggtgggggcagataagagactggtgggggcagataagtcgctggtgggggcagataaggacctggtgggggcagataagctactggtgggggcagataagactctggtgggggcagataagtgcggcgcgccatgcttcatcagactct

SEQ ID NO: 3325 - DNA, 197 bp, Artificial Sequence; identical to SEQ ID NO: 3324
  Synthetic polynucleotide

SEQ ID NO: 3326 - DNA, 164 bp, Artificial Sequence
  Synthetic polynucleotide
atcatctcaccttgcctcctgcagactctgccggcatacctgcaggatgactcatagaatgactcattcgatgactcatgacatgactcatctaatgactcatactatgactcattgcatgactcatgtaatgactcatggcgcgccatgcttcatcagactct

SEQ ID NO: 3327 - DNA, 164 bp, Artificial Sequence; identical to SEQ ID NO: 3326
  Synthetic polynucleotide

SEQ ID NO: 3328 - DNA, 156 bp, Artificial Sequence
  Synthetic polynucleotide
atcatctcaccttgcctcctgcaaacaatcctcccatgcctgcaggttccgcttagattccgctttcgttccgcttgacttccgcttctattccgcttactttccgctttgcttccgcttgtattccgcttggcgcgccatgcttcatcagactct

SEQ ID NO: 3329 - DNA, 156 bp, Artificial Sequence; identical to SEQ ID NO: 3328
  Synthetic polynucleotide

SEQ ID NO: 3330 - DNA, 164 bp, Artificial Sequence
  Synthetic polynucleotide
atcatctcaccttgcctcctgctatgcctcttgaagtgcctgcaggtcaatgagtagatcaatgagttcgtcaatgagtgactcaatgagtctatcaatgagtacttcaatgagttgctcaatgagtgtatcaatgagtggcgcgccatgcttcatcagactct

SEQ ID NO: 3331 - DNA, 164 bp, Artificial Sequence; identical to SEQ ID NO: 3330
  Synthetic polynucleotide

SEQ ID NO: 3332 - DNA, 191 bp, Artificial Sequence
  Synthetic polynucleotide
atcatctcaccttgcctcctgaggcacccactcattcgcctgcaggctgtttgtttacattttagactgtttgtttacatttttcgctgtttgtttacattttgacctgtttgtttacattttctactgtttgtttacattttactctgtttgtttacatttttgcggcgcgccatgcttcatcagactct

SEQ ID NO: 3333 - DNA, 191 bp, Artificial Sequence; identical to SEQ ID NO: 3332
  Synthetic polynucleotide

SEQ ID NO: 3334 - DNA, 196 bp, Artificial Sequence
  Synthetic polynucleotide
atcatctcaccttgcctcctgtcagagtgggattaaatcctgcaggttgacagctgtcaagattgacagctgtcatcgttgacagctgtcagacttgacagctgtcactattgacagctgtcaactttgacagctgtcatgcttgacagctgtcagtattgacagctgtcaggcgcgccatgcttcatcagactct

SEQ ID NO: 3335 - DNA, 196 bp, Artificial Sequence; identical to SEQ ID NO: 3334
  Synthetic polynucleotide

SEQ ID NO: 3336 - DNA, 164 bp, Artificial Sequence
  Synthetic polynucleotide
atcatctcaccttgcctcctgctaacaccaacataacacctgcaggttgcgtaagagattgcgtaagtcgttgcgtaaggacttgcgtaagctattgcgtaagactttgcgtaagtgcttgcgtaaggtattgcgtaagggcgcgccatgcttcatcagactct

SEQ ID NO: 3337 - DNA, 164 bp, Artificial Sequence; identical to SEQ ID NO: 3336
  Synthetic polynucleotide

SEQ ID NO: 3338 - DNA, 172 bp, Artificial Sequence
  Synthetic polynucleotide
atcatctcaccttgcctcctgattagcccgtttgcgaacctgcaggatgagtcataagaatgagtcatatcgatgagtcatagacatgagtcatactaatgagtcataactatgagtcatatgcatgagtcatagtaatgagtcataggcgcgccatgcttcatcagactct

SEQ ID NO: 3339 - DNA, 172 bp, Artificial Sequence; identical to SEQ ID NO: 3338
  Synthetic polynucleotide

SEQ ID NO: 3340 - DNA, 190 bp, Artificial Sequence
  Synthetic polynucleotide
atcatctcaccttgcctcctgcctagtgacccatgcctcctgcaggtcccctatctttacagatcccctatctttactcgtcccctatctttacgactcccctatctttacctatcccctatctttacacttcccctatctttactgctcccctatctttacgtaggcgcgccatgcttcatcagactct

SEQ ID NO: 3341 - DNA, 190 bp, Artificial Sequence; identical to SEQ ID NO: 3340
  Synthetic polynucleotide

SEQ ID NO: 3342 - DNA, 190 bp, Artificial Sequence
  Synthetic polynucleotide
atcatctcaccttgcctcctggctccatatagaaacttcctgcaggtttgccttatatggagatttgccttatatggtcgtttgccttatatgggactttgccttatatggctatttgccttatatggacttttgccttatatggtgctttgccttatatgggtaggcgcgccatgcttcatcagactct

SEQ ID NO: 3343 - DNA, 190 bp, Artificial Sequence; identical to SEQ ID NO: 3342
  Synthetic polynucleotide

SEQ ID NO: 3344 - DNA, 172 bp, Artificial Sequence
  Synthetic polynucleotide
atcatctcaccttgcctcctgatacaataggcctagtccctgcaggatgagtcatcagaatgagtcatctcgatgagtcatcgacatgagtcatcctaatgagtcatcactatgagtcatctgcatgagtcatcgtaatgagtcatcggcgcgccatgcttcatcagactct

SEQ ID NO: 3345 - DNA, 172 bp, Artificial Sequence; identical to SEQ ID NO: 3344
  Synthetic polynucleotide

SEQ ID NO: 3346 - DNA, 172 bp, Artificial Sequence
  Synthetic polynucleotide
atcatctcaccttgcctcctgcaagctggatccgccaacctgcaggatgagtcattagaatgagtcatttcgatgagtcattgacatgagtcattctaatgagtcattactatgagtcatttgcatgagtcattgtaatgagtcattggcgcgccatgcttcatcagactct

SEQ ID NO: 3347 - DNA, 172 bp, Artificial Sequence; identical to SEQ ID NO: 3346
  Synthetic polynucleotide

SEQ ID NO: 3348 - DNA, 188 bp, Artificial Sequence
  Synthetic polynucleotide
atcatctcaccttgcctcctgaggtctaaaggctggatcctgcagggaacagatggtcagagaacagatggtctcggaacagatggtcgacgaacagatggtcctagaacagatggtcactgaacagatggtctgcgaacagatggtcgtagaacagatggtcggcgcgccatgcttcatcagactct

SEQ ID NO: 3349 - DNA, 188 bp, Artificial Sequence; identical to SEQ ID NO: 3348
  Synthetic polynucleotide

SEQ ID NO: 3350 - DNA, 172 bp, Artificial Sequence
  Synthetic polynucleotide
atcatctcaccttgcctcctgaacttcctaagggacagcctgcaggaaggtgacctagaaaggtgaccttcgaaggtgacctgacaaggtgacctctaaaggtgacctactaaggtgaccttgcaaggtgacctgtaaaggtgacctggcgcgccatgcttcatcagactct

SEQ ID NO: 3351 - DNA, 172 bp, Artificial Sequence; identical to SEQ ID NO: 3350
  Synthetic polynucleotide

SEQ ID NO: 3352 - DNA, 197 bp, Artificial Sequence
  Synthetic polynucleotide
atcatctcaccttgcctcctgcatgcgacccagtcgtacctgcaggagtttcggtttcgttagaagtttcggtttcgtttcgagtttcggtttcgttgacagtttcggtttcgttctaagtttcggtttcgttactagtttcggtttcgtttgcagtttcggtttcgttgtaggcgcgccatgcttcatcagactct

SEQ ID NO: 3353 - DNA, 197 bp, Artificial Sequence; identical to SEQ ID NO: 3352
  Synthetic polynucleotide

SEQ ID NO: 3354 - DNA, 148 bp, Artificial Sequence
  Synthetic polynucleotide
atcatctcaccttgcctcctgcacttgacaccgtacatcctgcagggtgatacagagtgatactcggtgatacgacgtgatacctagtgatacactgtgatactgcgtgatacgtagtgatacggcgcgccatgcttcatcagactct

SEQ ID NO: 3355 - DNA, 148 bp, Artificial Sequence; identical to SEQ ID NO: 3354
  Synthetic polynucleotide

SEQ ID NO: 3356 - DNA, 197 bp, Artificial Sequence
  Synthetic polynucleotide
atcatctcaccttgcctcctggttgtagcagtccgccacctgcaggctttcacaccttttcagactttcacaccttttctcgctttcacaccttttcgacctttcacaccttttcctactttcacaccttttcactctttcacaccttttctgcctttcacaccttttcgtaggcgcgccatgcttcatcagactct

SEQ ID NO: 3357 - DNA, 197 bp, Artificial Sequence; identical to SEQ ID NO: 3356
  Synthetic polynucleotide

SEQ ID NO: 3358 - DNA, 197 bp, Artificial Sequence
  Synthetic polynucleotide
atcatctcaccttgcctcctgcctatcgaacagtacggcctgcaggaggggatttccaaggagaaggggatttccaaggtcgaggggatttccaagggacaggggatttccaaggctaaggggatttccaaggactaggggatttccaaggtgcaggggatttccaagggtaggcgcgccatgcttcatcagactct

SEQ ID NO: 3359 - DNA, 197 bp, Artificial Sequence; identical to SEQ ID NO: 3358
  Synthetic polynucleotide

SEQ ID NO: 3360 - DNA, 197 bp, Artificial Sequence
  Synthetic polynucleotide
atcatctcaccttgcctcctgttcagattgctatgagtcctgcaggaacaatttcattgttagaaacaatttcattgtttcgaacaatttcattgttgacaacaatttcattgttctaaacaatttcattgttactaacaatttcattgtttgcaacaatttcattgttgtaggcgcgccatgcttcatcagactct

SEQ ID NO: 3361 - DNA, 197 bp, Artificial Sequence; identical to SEQ ID NO: 3360
  Synthetic polynucleotide

SEQ ID NO: 3362 - DNA, 190 bp, Artificial Sequence
  Synthetic polynucleotide
atcatctcaccttgcctcctgaccaccaatgctgcaggcctgcaggtgaatgttcagtcaagatgaatgttcagtcatcgtgaatgttcagtcagactgaatgttcagtcactatgaatgttcagtcaacttgaatgttcagtcatgctgaatgttcagtcagtaggcgcgccatgcttcatcagactct

SEQ ID NO: 3363 - DNA, 190 bp, Artificial Sequence; identical to SEQ ID NO: 3362
  Synthetic polynucleotide

SEQ ID NO: 3364 - DNA, 164 bp, Artificial Sequence
  Synthetic polynucleotide
atcatctcaccttgcctcctgcagaatcaaggttcgcacctgcaggatgactcaaagaatgactcaatcgatgactcaagacatgactcaactaatgactcaaactatgactcaatgcatgactcaagtaatgactcaaggcgcgccatgcttcatcagactct

SEQ ID NO: 3365 - DNA, 164 bp, Artificial Sequence; identical to SEQ ID NO: 3364
  Synthetic polynucleotide

SEQ ID NO: 3366 - DNA, 197 bp, Artificial Sequence
  Synthetic polynucleotide
atcatctcaccttgcctcctgcgttgaaggcgtattagcctgcaggtgcctgggtgtggctagatgcctgggtgtggcttcgtgcctgggtgtggctgactgcctgggtgtggctctatgcctgggtgtggctacttgcctgggtgtggcttgctgcctgggtgtggctgtaggcgcgccatgcttcatcagactct

SEQ ID NO: 3367 - DNA, 197 bp, Artificial Sequence; identical to SEQ ID NO: 3366
  Synthetic polynucleotide

SEQ ID NO: 3368 - DNA, 191 bp, Artificial Sequence
  Synthetic polynucleotide
atcatctcaccttgcctcctggtcttctgctgtgttgacctgcagggtcttgttattgattttttttagagtcttgttattgatttttttttcggtcttgttattgattttttttgacgtcttgttattgattttttttctagtcttgttattgattttttttactggcgcgccatgcttcatcagactct

SEQ ID NO: 3369 - DNA, 191 bp, Artificial Sequence; identical to SEQ ID NO: 3368
  Synthetic polynucleotide

SEQ ID NO: 3370 - DNA, 148 bp, Artificial Sequence
  Synthetic polynucleotide
atcatctcaccttgcctcctgcgcacctatgatggtagcctgcaggcacctgtagacacctgttcgcacctgtgaccacctgtctacacctgtactcacctgttgccacctgtgtacacctgtggcgcgccatgcttcatcagactct

SEQ ID NO: 3371 - DNA, 148 bp, Artificial Sequence; identical to SEQ ID NO: 3370
  Synthetic polynucleotide

SEQ ID NO: 3372 - DNA, 180 bp, Artificial Sequence
  Synthetic polynucleotide
atcatctcaccttgcctcctgggacatgcaacaaatgacctgcaggataaacaagccagaataaacaagcctcgataaacaagccgacataaacaagccctaataaacaagccactataaacaagcctgcataaacaagccgtaataaacaagccggcgcgccatgcttcatcagactct

SEQ ID NO: 3373 - DNA, 180 bp, Artificial Sequence; identical to SEQ ID NO: 3372
  Synthetic polynucleotide

SEQ ID NO: 3374 - DNA, 164 bp, Artificial Sequence
  Synthetic polynucleotide
atcatctcaccttgcctcctgttaactcaggcggccatcctgcaggggtaaacaaagaggtaaacaatcgggtaaacaagacggtaaacaactaggtaaacaaactggtaaacaatgcggtaaacaagtaggtaaacaaggcgcgccatgcttcatcagactct

SEQ ID NO: 3375 - DNA, 164 bp, Artificial Sequence; identical to SEQ ID NO: 3374
  Synthetic polynucleotide

SEQ ID NO: 3376 - DNA, 180 bp, Artificial Sequence
  Synthetic polynucleotide
atcatctcaccttgcctcctgtatttgcgcaacgtggacctgcagggggattatcccagagggattatccctcggggattatcccgacgggattatcccctagggattatcccactgggattatccctgcgggattatcccgtagggattatcccggcgcgccatgcttcatcagactct

SEQ ID NO: 3377 - DNA, 180 bp, Artificial Sequence; identical to SEQ ID NO: 3376
  Synthetic polynucleotide

SEQ ID NO: 3378 - DNA, 197 bp, Artificial Sequence
  Synthetic polynucleotide
atcatctcaccttgcctcctgcacagtccaatggctgtcctgcaggtcacctgttgctaggagatcacctgttgctaggtcgtcacctgttgctagggactcacctgttgctaggctatcacctgttgctaggacttcacctgttgctaggtgctcacctgttgctagggtaggcgcgccatgcttcatcagactct

SEQ ID NO: 3379 - DNA, 197 bp, Artificial Sequence; identical to SEQ ID NO: 3378
  Synthetic polynucleotide

SEQ ID NO: 3380 - DNA, 172 bp, Artificial Sequence
  Synthetic polynucleotide
atcatctcaccttgcctcctgtcactgatcatatcccacctgcaggcttaattggtagacttaattggttcgcttaattggtgaccttaattggtctacttaattggtactcttaattggttgccttaattggtgtacttaattggtggcgcgccatgcttcatcagactct

SEQ ID NO: 3381 - DNA, 172 bp, Artificial Sequence; identical to SEQ ID NO: 3380
  Synthetic polynucleotide

SEQ ID NO: 3382 - DNA, 140 bp, Artificial Sequence
  Synthetic polynucleotide
atcatctcaccttgcctcctgtcctaagctgtttctgtcctgcaggtaatccagataatcctcgtaatccgactaatccctataatccacttaatcctgctaatccgtataatccggcgcgccatgcttcatcagactct

SEQ ID NO: 3383 - DNA, 140 bp, Artificial Sequence; identical to SEQ ID NO: 3382
  Synthetic polynucleotide

SEQ ID NO: 3384 - DNA, 148 bp, Artificial Sequence
  Synthetic polynucleotide
atcatctcaccttgcctcctgcgagtgttccacgaaatcctgcaggcacctggagacacctggtcgcacctgggaccacctggctacacctggactcacctggtgccacctgggtacacctggggcgcgccatgcttcatcagactct

SEQ ID NO: 3385 - DNA, 148 bp, Artificial Sequence; identical to SEQ ID NO: 3384
  Synthetic polynucleotide

SEQ ID NO: 3386 - DNA, 188 bp, Artificial Sequence
  Synthetic polynucleotide
atcatctcaccttgcctcctgcgaactcgtgatgctatcctgcaggttaatatttaacagattaatatttaactcgttaatatttaacgacttaatatttaacctattaatatttaacactttaatatttaactgcttaatatttaacgtattaatatttaacggcgcgccatgcttcatcagactct

SEQ ID NO: 3387 - DNA, 188 bp, Artificial Sequence; identical to SEQ ID NO: 3386
  Synthetic polynucleotide

SEQ ID NO: 3388 - DNA, 172 bp, Artificial Sequence
  Synthetic polynucleotide
atcatctcaccttgcctcctgtgtctggtccgcgatgacctgcaggccggggggtcagaccggggggtctcgccggggggtcgacccggggggtcctaccggggggtcactccggggggtctgcccggggggtcgtaccggggggtcggcgcgccatgcttcatcagactct

SEQ ID NO: 3389 - DNA, 172 bp, Artificial Sequence; identical to SEQ ID NO: 3388
  Synthetic polynucleotide

SEQ ID NO: 3390 - DNA, 148 bp, Artificial Sequence
  Synthetic polynucleotide
atcatctcaccttgcctcctgacgatctagagtcgggccctgcaggcacctgcagacacctgctcgcacctgcgaccacctgcctacacctgcactcacctgctgccacctgcgtacacctgcggcgcgccatgcttcatcagactct

SEQ ID NO: 3391 - DNA, 148 bp, Artificial Sequence; identical to SEQ ID NO: 3390
  Synthetic polynucleotide

SEQ ID NO: 3392 - DNA, 164 bp, Artificial Sequence
  Synthetic polynucleotide
atcatctcaccttgcctcctgtatgtttgggattgcagcctgcaggagagggaggagaagagggaggtcgagagggagggacagagggaggctaagagggaggactagagggaggtgcagagggagggtaagagggaggggcgcgccatgcttcatcagactct

SEQ ID NO: 3393 - DNA, 164 bp, Artificial Sequence; identical to SEQ ID NO: 3392
  Synthetic polynucleotide

SEQ ID NO: 3394 - DNA, 191 bp, Artificial Sequence
  Synthetic polynucleotide
atcatctcaccttgcctcctgcgatgcctggtatacaccctgcaggtacagctaattagtttaagatacagctaattagtttatcgtacagctaattagtttagactacagctaattagtttactatacagctaattagtttaacttacagctaattagtttatgcggcgcgccatgcttcatcagactct

SEQ ID NO: 3395 - DNA, 191 bp, Artificial Sequence; identical to SEQ ID NO: 3394
  Synthetic polynucleotide

SEQ ID NO: 3396 - DNA, 164 bp, Artificial Sequence
  Synthetic polynucleotide
atcatctcaccttgcctcctgttgcatagacaggacttcctgcaggcactaattaagacactaattatcgcactaattagaccactaattactacactaattaactcactaattatgccactaattagtacactaattaggcgcgccatgcttcatcagactct

SEQ ID NO: 3397 - DNA, 164 bp, Artificial Sequence; identical to SEQ ID NO: 3396
  Synthetic polynucleotide

SEQ ID NO: 3398 - DNA, 200 bp, Artificial Sequence
  Synthetic polynucleotide
atcatctcaccttgcctcctgtcgaattaagtaccgaccctgcaggtggagtcgagcactaatgggggagttggcaagatggagtcgagcactaatgggggagttggcatcgtggagtcgagcactaatgggggagttggcagactggagtcgagcactaatgggggagttggcaggcgcgccatgcttcatcagactct

SEQ ID NO: 3399 - DNA, 200 bp, Artificial Sequence; identical to SEQ ID NO: 3398
  Synthetic polynucleotide

SEQ ID NO: 3400 - DNA, 156 bp, Artificial Sequence
  Synthetic polynucleotide
atcatctcaccttgcctcctgttccacggttgaagatccctgcaggttgtttacagattgtttactcgttgtttacgacttgtttacctattgtttacactttgtttactgcttgtttacgtattgtttacggcgcgccatgcttcatcagactct

SEQ ID NO: 3401 - DNA, 156 bp, Artificial Sequence; identical to SEQ ID NO: 3400
  Synthetic polynucleotide

SEQ ID NO: 3402 - DNA, 172 bp, Artificial Sequence
  Synthetic polynucleotide
atcatctcaccttgcctcctgtagtgtacggctttccacctgcaggactacaactcagaactacaactctcgactacaactcgacactacaactcctaactacaactcactactacaactctgcactacaactcgtaactacaactcggcgcgccatgcttcatcagactct

SEQ ID NO: 3403 - DNA, 172 bp, Artificial Sequence; identical to SEQ ID NO: 3402
  Synthetic polynucleotide

SEQ ID NO: 3404 - DNA, 164 bp, Artificial Sequence
  Synthetic polynucleotide
atcatctcaccttgcctcctgcctcacacggaactaagcctgcaggctcataaaaagactcataaaatcgctcataaaagacctcataaaactactcataaaaactctcataaaatgcctcataaaagtactcataaaaggcgcgccatgcttcatcagactct

SEQ ID NO: 3405 - DNA, 164 bp, Artificial Sequence; identical to SEQ ID NO: 3404
  Synthetic polynucleotide

SEQ ID NO: 3406 - DNA, 191 bp, Artificial Sequence
  Synthetic polynucleotide
atcatctcaccttgcctcctgtcaatctgatgctctcccctgcaggaatgcaataaaatttatagaaatgcaataaaatttattcgaatgcaataaaatttatgacaatgcaataaaatttatctaaatgcaataaaatttatactaatgcaataaaatttattgcggcgcgccatgcttcatcagactct

SEQ ID NO: 3407 - DNA, 191 bp, Artificial Sequence; identical to SEQ ID NO: 3406
  Synthetic polynucleotide

SEQ ID NO: 3408 - DNA, 156 bp, Artificial Sequence
  Synthetic polynucleotide
atcatctcaccttgcctcctgttcaaactgtgcggccccctgcaggaattacaaagaaattacaatcgaattacaagacaattacaactaaattacaaactaattacaatgcaattacaagtaaattacaaggcgcgccatgcttcatcagactct

SEQ ID NO: 3409 - DNA, 156 bp, Artificial Sequence; identical to SEQ ID NO: 3408
  Synthetic polynucleotide

SEQ ID NO: 3410 - DNA, 172 bp, Artificial Sequence
  Synthetic polynucleotide
atcatctcaccttgcctcctgataatcgcgtgtcgtttcctgcaggccgcaataaaagaccgcaataaatcgccgcaataaagacccgcaataaactaccgcaataaaactccgcaataaatgcccgcaataaagtaccgcaataaaggcgcgccatgcttcatcagactct

SEQ ID NO: 3411 - DNA, 172 bp, Artificial Sequence; identical to SEQ ID NO: 3410
  Synthetic polynucleotide

SEQ ID NO: 3412 - DNA, 188 bp, Artificial Sequence
  Synthetic polynucleotide
atcatctcaccttgcctcctgactgttggaataccgaccctgcaggaaaaatcaataaagaaaaaatcaataatcgaaaaatcaataagacaaaaatcaataactaaaaaatcaataaactaaaaatcaataatgcaaaaatcaataagtaaaaaatcaataaggcgcgccatgcttcatcagactct

SEQ ID NO: 3413 - DNA, 188 bp, Artificial Sequence; identical to SEQ ID NO: 3412
  Synthetic polynucleotide

SEQ ID NO: 3414 - DNA, 172 bp, Artificial Sequence
  Synthetic polynucleotide
atcatctcaccttgcctcctgacaccttgcaagccgtccctgcaggcttaattggcagacttaattggctcgcttaattggcgaccttaattggcctacttaattggcactcttaattggctgccttaattggcgtacttaattggcggcgcgccatgcttcatcagactct

SEQ ID NO: 3415 - DNA, 172 bp, Artificial Sequence; identical to SEQ ID NO: 3414
  Synthetic polynucleotide

SEQ ID NO: 3416 - DNA, 172 bp, Artificial Sequence
  Synthetic polynucleotide
atcatctcaccttgcctcctgatgcgagcagtgggagtcctgcaggtcagcaaaatagatcagcaaaattcgtcagcaaaatgactcagcaaaatctatcagcaaaatacttcagcaaaattgctcagcaaaatgtatcagcaaaatggcgcgccatgcttcatcagactct

SEQ ID NO: 3417 - DNA, 172 bp, Artificial Sequence; identical to SEQ ID NO: 3416
  Synthetic polynucleotide

SEQ ID NO: 3418 - DNA, 180 bp, Artificial Sequence
  Synthetic polynucleotide
atcatctcaccttgcctcctgcatcctaaaggcaggcgcctgcaggctggaactcacagactggaactcactcgctggaactcacgacctggaactcacctactggaactcacactctggaactcactgcctggaactcacgtactggaactcacggcgcgccatgcttcatcagactct

SEQ ID NO: 3419 - DNA, 180 bp, Artificial Sequence; identical to SEQ ID NO: 3418
  Synthetic polynucleotide

SEQ ID NO: 3420 - DNA, 164 bp, Artificial Sequence
  Synthetic polynucleotide
atcatctcaccttgcctcctggaattctcttacactgtcctgcaggtttaattggagatttaattggtcgtttaattgggactttaattggctatttaattggacttttaattggtgctttaattgggtatttaattggggcgcgccatgcttcatcagactct

SEQ ID NO: 3421 - DNA, 164 bp, Artificial Sequence; identical to SEQ ID NO: 3420
  Synthetic polynucleotide

SEQ ID NO: 3422 - DNA, 140 bp, Artificial Sequence
  Synthetic polynucleotide
atcatctcaccttgcctcctggtaagcgcactatctatcctgcaggtggactagatggacttcgtggactgactggactctatggactacttggacttgctggactgtatggactggcgcgccatgcttcatcagactct

SEQ ID NO: 3423 - DNA, 140 bp, Artificial Sequence; identical to SEQ ID NO: 3422
  Synthetic polynucleotide

SEQ ID NO: 3424 - DNA, 200 bp, Artificial Sequence
  Synthetic polynucleotide
atcatctcaccttgcctcctggaacagaatgatatgctcctgcaggccttatctgcccccaccagagaccttatctgcccccaccagtcgccttatctgcccccaccaggacccttatctgcccccaccagctaccttatctgcccccaccagactccttatctgcccccaccagggcgcgccatgcttcatcagactct

SEQ ID NO: 3425 - DNA, 200 bp, Artificial Sequence; identical to SEQ ID NO: 3424
  Synthetic polynucleotide

SEQ ID NO: 3426 - DNA, 185 bp, Artificial Sequence
  Synthetic polynucleotide
atcatctcaccttgcctcctgaacatgcacccagccagcctgcagggtacatccggatttttagagtacatccggattttttcggtacatccggatttttgacgtacatccggatttttctagtacatccggatttttactgtacatccggattttttgcggcgcgccatgcttcatcagactct

SEQ ID NO: 3427 - DNA, 185 bp, Artificial Sequence; identical to SEQ ID NO: 3426
  Synthetic polynucleotide

SEQ ID NO: 3428 - DNA, 156 bp, Artificial Sequence
  Synthetic polynucleotide
atcatctcaccttgcctcctgaagggagtcgaacaagtcctgcagggatttccaagagatttccatcggatttccagacgatttccactagatttccaactgatttccatgcgatttccagtagatttccaggcgcgccatgcttcatcagactct

SEQ ID NO: 3429 - DNA, 156 bp, Artificial Sequence; identical to SEQ ID NO: 3428
  Synthetic polynucleotide

SEQ ID NO: 3430 - DNA, 172 bp, Artificial Sequence
  Synthetic polynucleotide
atcatctcaccttgcctcctgcctatagatgaggacaacctgcaggactacaattcagaactacaattctcgactacaattcgacactacaattcctaactacaattcactactacaattctgcactacaattcgtaactacaattcggcgcgccatgcttcatcagactct

SEQ ID NO: 3431 - DNA, 172 bp, Artificial Sequence; identical to SEQ ID NO: 3430
  Synthetic polynucleotide

SEQ ID NO: 3432 - DNA, 186 bp, Artificial Sequence
  Synthetic polynucleotide
atcatctcaccttgcctcctgacgtttgataggcgcgtcctgcaggtaagtcatccctcaggaatgagataagtcatccctcaggaatgtcgtaagtcatccctcaggaatggactaagtcatccctcaggaatgctataagtcatccctcaggaatgactggcgcgccatgcttcatcagactct

SEQ ID NO: 3433 - DNA, 186 bp, Artificial Sequence; identical to SEQ ID NO: 3432
  Synthetic polynucleotide

SEQ ID NO: 3434 - DNA, 180 bp, Artificial Sequence
  Synthetic polynucleotide
atcatctcaccttgcctcctgctgtgttgttagccattcctgcaggggccggaagtgagaggccggaagtgtcgggccggaagtggacggccggaagtgctaggccggaagtgactggccggaagtgtgcggccggaagtggtaggccggaagtgggcgcgccatgcttcatcagactct

SEQ ID NO: 3435 - DNA, 180 bp, Artificial Sequence; identical to SEQ ID NO: 3434
  Synthetic polynucleotide

SEQ ID NO: 3436 - DNA, 156 bp, Artificial Sequence
  Synthetic polynucleotide
atcatctcaccttgcctcctgggtgctttaaggacacacctgcaggccacgtggagaccacgtggtcgccacgtgggacccacgtggctaccacgtggactccacgtggtgcccacgtgggtaccacgtggggcgcgccatgcttcatcagactct

SEQ ID NO: 3437 - DNA, 156 bp, Artificial Sequence; identical to SEQ ID NO: 3436
  Synthetic polynucleotide

SEQ ID NO: 3438 - DNA, 190 bp, Artificial Sequence
  Synthetic polynucleotide
atcatctcaccttgcctcctgctttggaccataaccgacctgcaggggggaaattcccctagaggggaaattccccttcgggggaaattcccctgacggggaaattcccctctaggggaaattcccctactggggaaattccccttgcggggaaattcccctgtaggcgcgccatgcttcatcagactct

SEQ ID NO: 3439 - DNA, 190 bp, Artificial Sequence; identical to SEQ ID NO: 3438
  Synthetic polynucleotide

SEQ ID NO: 3440 - DNA, 172 bp, Artificial Sequence
  Synthetic polynucleotide
atcatctcaccttgcctcctgtgcctaagatagcaggccctgcaggcccataaaaaagacccataaaaatcgcccataaaaagaccccataaaaactacccataaaaaactcccataaaaatgccccataaaaagtacccataaaaaggcgcgccatgcttcatcagactct

SEQ ID NO: 3441 - DNA, 172 bp, Artificial Sequence; identical to SEQ ID NO: 3440
  Synthetic polynucleotide

SEQ ID NO: 3442 - DNA, 172 bp, Artificial Sequence
  Synthetic polynucleotide
atcatctcaccttgcctcctgccttagtgtctatttcccctgcaggggggcggggcagaggggcggggctcgggggcggggcgacggggcggggcctaggggcggggcactggggcggggctgcggggcggggcgtaggggcggggcggcgcgccatgcttcatcagactct

SEQ ID NO: 3443 - DNA, 172 bp, Artificial Sequence; identical to SEQ ID NO: 3442
  Synthetic polynucleotide

SEQ ID NO: 3444 - DNA, 172 bp, Artificial Sequence
  Synthetic polynucleotide
atcatctcaccttgcctcctggttgcgtgggcaatgtccctgcaggaatgagtcatagaaatgagtcattcgaatgagtcatgacaatgagtcatctaaatgagtcatactaatgagtcattgcaatgagtcatgtaaatgagtcatggcgcgccatgcttcatcagactct

SEQ ID NO: 3445 - DNA, 172 bp, Artificial Sequence; identical to SEQ ID NO: 3444
  Synthetic polynucleotide

SEQ ID NO: 3446 - DNA, 180 bp, Artificial Sequence
  Synthetic polynucleotide
atcatctcaccttgcctcctgatacgaagacgcggacccctgcaggcactgacgtcaagacactgacgtcatcgcactgacgtcagaccactgacgtcactacactgacgtcaactcactgacgtcatgccactgacgtcagtacactgacgtcaggcgcgccatgcttcatcagactct

SEQ ID NO: 3447 - DNA, 180 bp, Artificial Sequence; identical to SEQ ID NO: 3446
  Synthetic polynucleotide

SEQ ID NO: 3448 - DNA, 156 bp, Artificial Sequence
  Synthetic polynucleotide
atcatctcaccttgcctcctgccgatcaccagataagtcctgcaggccacgtgcagaccacgtgctcgccacgtgcgacccacgtgcctaccacgtgcactccacgtgctgcccacgtgcgtaccacgtgcggcgcgccatgcttcatcagactct

SEQ ID NO: 3449 - DNA, 156 bp, Artificial Sequence; identical to SEQ ID NO: 3448
  Synthetic polynucleotide

SEQ ID NO: 3450 - DNA, 191 bp, Artificial Sequence
  Synthetic polynucleotide
atcatctcaccttgcctcctgatgagtgcagaacaagacctgcaggtgacctgacctgacctcagatgacctgacctgacctctcgtgacctgacctgacctcgactgacctgacctgacctcctatgacctgacctgacctcacttgacctgacctgacctctgcggcgcgccatgcttcatcagactct

SEQ ID NO: 3451 - DNA, 191 bp, Artificial Sequence; identical to SEQ ID NO: 3450
  Synthetic polynucleotide

SEQ ID NO: 3452 - DNA, 180 bp, Artificial Sequence
  Synthetic polynucleotide
atcatctcaccttgcctcctgacagaggtcagcaactacctgcaggtaattaaattaagataattaaattatcgtaattaaattagactaattaaattactataattaaattaacttaattaaattatgctaattaaattagtataattaaattaggcgcgccatgcttcatcagactct

SEQ ID NO: 3453 - DNA, 180 bp, Artificial Sequence; identical to SEQ ID NO: 3452
  Synthetic polynucleotide

SEQ ID NO: 3454 - DNA, 180 bp, Artificial Sequence
  Synthetic polynucleotide
atcatctcaccttgcctcctgagacttagtagcaccaccctgcaggcaacaggtgttagacaacaggtgtttcgcaacaggtgttgaccaacaggtgttctacaacaggtgttactcaacaggtgtttgccaacaggtgttgtacaacaggtgttggcgcgccatgcttcatcagactct

SEQ ID NO: 3455 - DNA, 180 bp, Artificial Sequence; identical to SEQ ID NO: 3454
  Synthetic polynucleotide

SEQ ID NO: 3456 - DNA, 164 bp, Artificial Sequence
  Synthetic polynucleotide
atcatctcaccttgcctcctggaacttcatccgtctcgcctgcagggtgaaacttagagtgaaactttcggtgaaacttgacgtgaaacttctagtgaaacttactgtgaaactttgcgtgaaacttgtagtgaaacttggcgcgccatgcttcatcagactct

SEQ ID NO: 3457 - DNA, 164 bp, Artificial Sequence; identical to SEQ ID NO: 3456
  Synthetic polynucleotide

SEQ ID NO: 3458 - DNA, 156 bp, Artificial Sequence
  Synthetic polynucleotide
atcatctcaccttgcctcctggcatctgtcctcgtaatcctgcagggatttccgagagatttccgtcggatttccggacgatttccgctagatttccgactgatttccgtgcgatttccggtagatttccgggcgcgccatgcttcatcagactct

SEQ ID NO: 3459 - DNA, 156 bp, Artificial Sequence; identical to SEQ ID NO: 3458
  Synthetic polynucleotide

SEQ ID NO: 3460 - DNA, 190 bp, Artificial Sequence
  Synthetic polynucleotide
atcatctcaccttgcctcctgggctgctcaacaggtatcctgcagggatgacgtcaccccagagatgacgtcacccctcggatgacgtcaccccgacgatgacgtcaccccctagatgacgtcaccccactgatgacgtcacccctgcgatgacgtcaccccgtaggcgcgccatgcttcatcagactct

SEQ ID NO: 3461 - DNA, 190 bp, Artificial Sequence; identical to SEQ ID NO: 3460
  Synthetic polynucleotide

SEQ ID NO: 3462 - DNA, 156 bp, Artificial Sequence
  Synthetic polynucleotide
atcatctcaccttgcctcctggggttgtataaatttgccctgcagggatttcccagagatttccctcggatttcccgacgatttcccctagatttcccactgatttccctgcgatttcccgtagatttcccggcgcgccatgcttcatcagactct

SEQ ID NO: 3463 - DNA, 156 bp, Artificial Sequence; identical to SEQ ID NO: 3462
  Synthetic polynucleotide

SEQ ID NO: 3464 - DNA, 156 bp, Artificial Sequence
  Synthetic polynucleotide
atcatctcaccttgcctcctgactgtctgtcacaccctcctgcaggccacgtgtagaccacgtgttcgccacgtgtgacccacgtgtctaccacgtgtactccacgtgttgcccacgtgtgtaccacgtgtggcgcgccatgcttcatcagactct

SEQ ID NO: 3465 - DNA, 156 bp, Artificial Sequence; identical to SEQ ID NO: 3464
  Synthetic polynucleotide

SEQ ID NO: 3466 - DNA, 188 bp, Artificial Sequence
  Synthetic polynucleotide
atcatctcaccttgcctcctgcaaggatggccgatgtgcctgcaggtataaaaggaccagatataaaaggacctcgtataaaaggaccgactataaaaggaccctatataaaaggaccacttataaaaggacctgctataaaaggaccgtatataaaaggaccggcgcgccatgcttcatcagactct

SEQ ID NO: 3467 - DNA, 188 bp, Artificial Sequence; identical to SEQ ID NO: 3466
  Synthetic polynucleotide

SEQ ID NO: 3468 - DNA, 172 bp, Artificial Sequence
  Synthetic polynucleotide
atcatctcaccttgcctcctggtaaggttgcctactcacctgcaggggggcggggtagaggggcggggttcgggggcggggtgacggggcggggtctaggggcggggtactggggcggggttgcggggcggggtgtaggggcggggtggcgcgccatgcttcatcagactct

SEQ ID NO: 3469 - DNA, 172 bp, Artificial Sequence; identical to SEQ ID NO: 3468
  Synthetic polynucleotide

SEQ ID NO: 3470 - DNA, 140 bp, Artificial Sequence
  Synthetic polynucleotide
atcatctcaccttgcctcctggccagcttcgaggtatacctgcaggtgtggtagatgtggttcgtgtggtgactgtggtctatgtggtacttgtggttgctgtggtgtatgtggtggcgcgccatgcttcatcagactct

SEQ ID NO: 3471 - DNA, 140 bp, Artificial Sequence; identical to SEQ ID NO: 3470
  Synthetic polynucleotide

SEQ ID NO: 3472 - DNA, 180 bp, Artificial Sequence
  Synthetic polynucleotide
atcatctcaccttgcctcctgagcaagccgattgaatgcctgcaggacgttacataaagaacgttacataatcgacgttacataagacacgttacataactaacgttacataaactacgttacataatgcacgttacataagtaacgttacataaggcgcgccatgcttcatcagactct

SEQ ID NO: 3473 - DNA, 180 bp, Artificial Sequence; identical to SEQ ID NO: 3472
  Synthetic polynucleotide

SEQ ID NO: 3474 - DNA, 172 bp, Artificial Sequence
  Synthetic polynucleotide
atcatctcaccttgcctcctgggaggccactctatactcctgcaggcatgcgggtaagacatgcgggtatcgcatgcgggtagaccatgcgggtactacatgcgggtaactcatgcgggtatgccatgcgggtagtacatgcgggtaggcgcgccatgcttcatcagactct

SEQ ID NO: 3475 - DNA, 172 bp, Artificial Sequence; identical to SEQ ID NO: 3474
  Synthetic polynucleotide

SEQ ID NO: 3476 - DNA, 190 bp, Artificial Sequence
  Synthetic polynucleotide
atcatctcaccttgcctcctgcatagacaaatcctccccctgcaggttgttgtttacataagattgttgtttacatatcgttgttgtttacatagacttgttgtttacatactattgttgtttacataactttgttgtttacatatgcttgttgtttacatagtaggcgcgccatgcttcatcagactct

SEQ ID NO: 3477 - DNA, 190 bp, Artificial Sequence; identical to SEQ ID NO: 3476
  Synthetic polynucleotide

SEQ ID NO: 3478 - DNA, 164 bp, Artificial Sequence
  Synthetic polynucleotide
atcatctcaccttgcctcctgcgaagtgccaatcatcccctgcaggcaattacggagacaattacggtcgcaattacgggaccaattacggctacaattacggactcaattacggtgccaattacgggtacaattacggggcgcgccatgcttcatcagactct

SEQ ID NO: 3479 - DNA, 164 bp, Artificial Sequence; identical to SEQ ID NO: 3478
  Synthetic polynucleotide

SEQ ID NO: 3480 - DNA, 148 bp, Artificial Sequence
  Synthetic polynucleotide
atcatctcaccttgcctcctgaccacatccatggaccccctgcagggtgacagagagtgacagtcggtgacaggacgtgacagctagtgacagactgtgacagtgcgtgacaggtagtgacagggcgcgccatgcttcatcagactct

SEQ ID NO: 3481 - DNA, 148 bp, Artificial Sequence; identical to SEQ ID NO: 3480
  Synthetic polynucleotide

SEQ ID NO: 3482 - DNA, 190 bp, Artificial Sequence
  Synthetic polynucleotide
atcatctcaccttgcctcctggcatgattacttctctgcctgcagggagaaccgaaactgagagagaaccgaaactgtcggagaaccgaaactggacgagaaccgaaactgctagagaaccgaaactgactgagaaccgaaactgtgcgagaaccgaaactggtaggcgcgccatgcttcatcagactct

SEQ ID NO: 3483 - DNA, 190 bp, Artificial Sequence; identical to SEQ ID NO: 3482
  Synthetic polynucleotide

SEQ ID NO: 3484 - DNA, 156 bp, Artificial Sequence
  Synthetic polynucleotide
atcatctcaccttgcctcctgaacggataagccaaactcctgcaggttgtttatagattgtttattcgttgtttatgacttgtttatctattgtttatactttgtttattgcttgtttatgtattgtttatggcgcgccatgcttcatcagactct

SEQ ID NO: 3485 - DNA, 156 bp, Artificial Sequence; identical to SEQ ID NO: 3484
  Synthetic polynucleotide

SEQ ID NO: 3486 - DNA, 196 bp, Artificial Sequence
  Synthetic polynucleotide
atcatctcaccttgcctcctgtatcgatggccttcccacctgcaggccaccagggggcgagaccaccagggggcgtcgccaccagggggcggacccaccagggggcgctaccaccagggggcgactccaccagggggcgtgcccaccagggggcggtaccaccagggggcgggcgcgccatgcttcatcagactct

SEQ ID NO: 3487 - DNA, 196 bp, Artificial Sequence; identical to SEQ ID NO: 3486
  Synthetic polynucleotide

SEQ ID NO: 3488 - DNA, 196 bp, Artificial Sequence
  Synthetic polynucleotide
atcatctcaccttgcctcctgttacgccgtcaatacatcctgcaggaagatgatgtcatagaaagatgatgtcattcgaagatgatgtcatgacaagatgatgtcatctaaagatgatgtcatactaagatgatgtcattgcaagatgatgtcatgtaaagatgatgtcatggcgcgccatgcttcatcagactct

SEQ ID NO: 3489 - DNA, 196 bp, Artificial Sequence; identical to SEQ ID NO: 3488
  Synthetic polynucleotide

SEQ ID NO: 3490 - DNA, 148 bp, Artificial Sequence
  Synthetic polynucleotide
atcatctcaccttgcctcctgctggaatccacgtatctcctgcaggccaggtgagaccaggtgtcgccaggtggacccaggtgctaccaggtgactccaggtgtgcccaggtggtaccaggtgggcgcgccatgcttcatcagactct

SEQ ID NO: 3491 - DNA, 148 bp, Artificial Sequence; identical to SEQ ID NO: 3490
  Synthetic polynucleotide

SEQ ID NO: 3492 - DNA, 186 bp, Artificial Sequence
  Synthetic polynucleotide
atcatctcaccttgcctcctgacgtccaataggctgtacctgcaggatagcgccccctggtggccaagaatagcgccccctggtggccatcgatagcgccccctggtggccagacatagcgccccctggtggccactaatagcgccccctggtggccaactggcgcgccatgcttcatcagactct

SEQ ID NO: 3493 - DNA, 186 bp, Artificial Sequence; identical to SEQ ID NO: 3492
  Synthetic polynucleotide

SEQ ID NO: 3494 - DNA, 164 bp, Artificial Sequence
  Synthetic polynucleotide
atcatctcaccttgcctcctggaagtgcaccaatcctacctgcaggcttccgcttagacttccgctttcgcttccgcttgaccttccgcttctacttccgcttactcttccgctttgccttccgcttgtacttccgcttggcgcgccatgcttcatcagactct

SEQ ID NO: 3495 - DNA, 164 bp, Artificial Sequence; identical to SEQ ID NO: 3494
  Synthetic polynucleotide

SEQ ID NO: 3496 - DNA, 190 bp, Artificial Sequence
  Synthetic polynucleotide
atcatctcaccttgcctcctgaactgtgtgtcccagtgcctgcaggtctgacctacttttagatctgacctactttttcgtctgacctacttttgactctgacctacttttctatctgacctacttttacttctgacctactttttgctctgacctacttttgtaggcgcgccatgcttcatcagactct

SEQ ID NO: 3497 - DNA, 190 bp, Artificial Sequence; identical to SEQ ID NO: 3496
  Synthetic polynucleotide

SEQ ID NO: 3498 - DNA, 191 bp, Artificial Sequence
  Synthetic polynucleotide
atcatctcaccttgcctcctggccatttcgttcggtgccctgcaggcgcattaattaattggcagacgcattaattaattggctcgcgcattaattaattggcgaccgcattaattaattggcctacgcattaattaattggcactcgcattaattaattggctgcggcgcgccatgcttcatcagactct

SEQ ID NO: 3499 - DNA, 191 bp, Artificial Sequence; identical to SEQ ID NO: 3498
  Synthetic polynucleotide

SEQ ID NO: 3500 - DNA, 197 bp, Artificial Sequence
  Synthetic polynucleotide
atcatctcaccttgcctcctggctggaaatcatccacacctgcaggtgggaaatgtagtttagatgggaaatgtagttttcgtgggaaatgtagtttgactgggaaatgtagtttctatgggaaatgtagtttacttgggaaatgtagttttgctgggaaatgtagtttgtaggcgcgccatgcttcatcagactct

SEQ ID NO: 3501 - DNA, 197 bp, Artificial Sequence; identical to SEQ ID NO: 3500
  Synthetic polynucleotide

SEQ ID NO: 3502 - DNA, 197 bp, Artificial Sequence
  Synthetic polynucleotide
atcatctcaccttgcctcctgtaaggccatctttccgccctgcaggctggtggggacagataagagactggtggggacagataagtcgctggtggggacagataaggacctggtggggacagataagctactggtggggacagataagactctggtggggacagataagtgcggcgcgccatgcttcatcagactct

SEQ ID NO: 3503 - DNA, 197 bp, Artificial Sequence; identical to SEQ ID NO: 3502
  Synthetic polynucleotide

SEQ ID NO: 3504 - DNA, 197 bp, Artificial Sequence
  Synthetic polynucleotide
atcatctcaccttgcctcctggatgattataggacctacctgcagggaccccccgctgtgcagagaccccccgctgtgctcggaccccccgctgtgcgacgaccccccgctgtgcctagaccccccgctgtgcactgaccccccgctgtgctgcgaccccccgctgtgcgtaggcgcgccatgcttcatcagactct

SEQ ID NO: 3505 - DNA, 197 bp, Artificial Sequence; identical to SEQ ID NO: 3504
  Synthetic polynucleotide

SEQ ID NO: 3506 - DNA, 156 bp, Artificial Sequence
  Synthetic polynucleotide
atcatctcaccttgcctcctgctctatcatcaatagagcctgcaggtatcagatagatatcagattcgtatcagatgactatcagatctatatcagatacttatcagattgctatcagatgtatatcagatggcgcgccatgcttcatcagactct

SEQ ID NO: 3507 - DNA, 156 bp, Artificial Sequence; identical to SEQ ID NO: 3506
  Synthetic polynucleotide

SEQ ID NO: 3508 - DNA, 180 bp, Artificial Sequence
  Synthetic polynucleotide
atcatctcaccttgcctcctgaaagctaatggcagtatcctgcagggccggaagtggagagccggaagtggtcggccggaagtgggacgccggaagtggctagccggaagtggactgccggaagtggtgcgccggaagtgggtagccggaagtggggcgcgccatgcttcatcagactct

SEQ ID NO: 3509 - DNA, 180 bp, Artificial Sequence; identical to SEQ ID NO: 3508
  Synthetic polynucleotide

SEQ ID NO: 3510 - DNA, 197 bp, Artificial Sequence
  Synthetic polynucleotide
atcatctcaccttgcctcctgtgcggtgaatctgtgtacctgcaggaattttggcgccaaaactagaaattttggcgccaaaacttcgaattttggcgccaaaactgacaattttggcgccaaaactctaaattttggcgccaaaactactaattttggcgccaaaacttgcggcgcgccatgcttcatcagactct

SEQ ID NO: 3511 - DNA, 197 bp, Artificial Sequence; identical to SEQ ID NO: 3510
  Synthetic polynucleotide

SEQ ID NO: 3512 - DNA, 180 bp, Artificial Sequence
  Synthetic polynucleotide
atcatctcaccttgcctcctgtacacgtccaacaatgacctgcaggccgcccccgcaagaccgcccccgcatcgccgcccccgcagacccgcccccgcactaccgcccccgcaactccgcccccgcatgcccgcccccgcagtaccgcccccgcaggcgcgccatgcttcatcagactct

SEQ ID NO: 3513 - DNA, 180 bp, Artificial Sequence; identical to SEQ ID NO: 3512
  Synthetic polynucleotide

SEQ ID NO: 3514 - DNA, 185 bp, Artificial Sequence
  Synthetic polynucleotide
atcatctcaccttgcctcctgtgacgcatatgtaagctcctgcaggaaaaaagaaaatgaaaagaaaaaaagaaaatgaaatcgaaaaaagaaaatgaaagacaaaaaagaaaatgaaactaaaaaaagaaaatgaaaactaaaaaagaaaatgaaatgcggcgcgccatgcttcatcagactct

SEQ ID NO: 3515 - DNA, 185 bp, Artificial Sequence; identical to SEQ ID NO: 3514
  Synthetic polynucleotide

SEQ ID NO: 3516 - DNA, 172 bp, Artificial Sequence
  Synthetic polynucleotide
atcatctcaccttgcctcctggtgactaacagcaacaacctgcaggatctagaacaagaatctagaacatcgatctagaacagacatctagaacactaatctagaacaactatctagaacatgcatctagaacagtaatctagaacaggcgcgccatgcttcatcagactct

SEQ ID NO: 3517 - DNA, 172 bp, Artificial Sequence; identical to SEQ ID NO: 3516
  Synthetic polynucleotide

SEQ ID NO: 3518 - DNA, 186 bp, Artificial Sequence
  Synthetic polynucleotide
atcatctcaccttgcctcctgcagttagagacgtagttcctgcaggcaaaggtcacgtgacctttgagacaaaggtcacgtgacctttgtcgcaaaggtcacgtgacctttggaccaaaggtcacgtgacctttgctacaaaggtcacgtgacctttgactggcgcgccatgcttcatcagactct

SEQ ID NO: 3519 - DNA, 186 bp, Artificial Sequence; identical to SEQ ID NO: 3518
  Synthetic polynucleotide

SEQ ID NO: 3520 - DNA, 196 bp, Artificial Sequence
  Synthetic polynucleotide
atcatctcaccttgcctcctgcctgaagctgctagacacctgcaggccccggcctccgcagaccccggcctccgctcgccccggcctccgcgacccccggcctccgcctaccccggcctccgcactccccggcctccgctgcccccggcctccgcgtaccccggcctccgcggcgcgccatgcttcatcagactct

SEQ ID NO: 3521 - DNA, 196 bp, Artificial Sequence; identical to SEQ ID NO: 3520
  Synthetic polynucleotide

SEQ ID NO: 3522 - DNA, 188 bp, Artificial Sequence
  Synthetic polynucleotide
atcatctcaccttgcctcctgccgaaagcttcttgttacctgcaggtccgcccccctcagatccgcccccctctcgtccgcccccctcgactccgcccccctcctatccgcccccctcacttccgcccccctctgctccgcccccctcgtatccgcccccctcggcgcgccatgcttcatcagactct

SEQ ID NO: 3523 - DNA, 188 bp, Artificial Sequence; identical to SEQ ID NO: 3522
  Synthetic polynucleotide

SEQ ID NO: 3524 - DNA, 191 bp, Artificial Sequence
  Synthetic polynucleotide
atcatctcaccttgcctcctgaagaacatccaacgtgccctgcaggggtaattaattaacgcgagaggtaattaattaacgcgtcgggtaattaattaacgcggacggtaattaattaacgcgctaggtaattaattaacgcgactggtaattaattaacgcgtgcggcgcgccatgcttcatcagactct

SEQ ID NO: 3525 - DNA, 191 bp, Artificial Sequence; identical to SEQ ID NO: 3524
  Synthetic polynucleotide

SEQ ID NO: 3526 - DNA, 196 bp, Artificial Sequence
  Synthetic polynucleotide
atcatctcaccttgcctcctggtacatgacgtaaggaccctgcaggcacaatactaaccagacacaatactaacctcgcacaatactaaccgaccacaatactaaccctacacaatactaaccactcacaatactaacctgccacaatactaaccgtacacaatactaaccggcgcgccatgcttcatcagactct

SEQ ID NO: 3527 - DNA, 196 bp, Artificial Sequence; identical to SEQ ID NO: 3526
  Synthetic polynucleotide

SEQ ID NO: 3528 - DNA, 172 bp, Artificial Sequence
  Synthetic polynucleotide
atcatctcaccttgcctcctgcgactactatgtttaggcctgcaggcccccccacgagacccccccacgtcgcccccccacggaccccccccacgctacccccccacgactcccccccacgtgccccccccacggtacccccccacgggcgcgccatgcttcatcagactct

SEQ ID NO: 3529 - DNA, 172 bp, Artificial Sequence; identical to SEQ ID NO: 3528
  Synthetic polynucleotide

SEQ ID NO: 3530 - DNA, 156 bp, Artificial Sequence
  Synthetic polynucleotide
atcatctcaccttgcctcctgcgcactaacagggtatgcctgcaggttgacaagagattgacaagtcgttgacaaggacttgacaagctattgacaagactttgacaagtgcttgacaaggtattgacaagggcgcgccatgcttcatcagactct

SEQ ID NO: 3531 - DNA, 156 bp, Artificial Sequence; identical to SEQ ID NO: 3530
  Synthetic polynucleotide

SEQ ID NO: 3532 - DNA, 164 bp, Artificial Sequence
  Synthetic polynucleotide
atcatctcaccttgcctcctgcttgggagcattcgtatcctgcaggtgtctgtctagatgtctgtcttcgtgtctgtctgactgtctgtctctatgtctgtctacttgtctgtcttgctgtctgtctgtatgtctgtctggcgcgccatgcttcatcagactct

SEQ ID NO: 3533 - DNA, 164 bp, Artificial Sequence; identical to SEQ ID NO: 3532
  Synthetic polynucleotide

SEQ ID NO: 3534 - DNA, 156 bp, Artificial Sequence
  Synthetic polynucleotide
atcatctcaccttgcctcctgtgttctgattgccagtacctgcaggcactaattagacactaatttcgcactaattgaccactaattctacactaattactcactaatttgccactaattgtacactaattggcgcgccatgcttcatcagactct

SEQ ID NO: 3535 - DNA, 156 bp, Artificial Sequence; identical to SEQ ID NO: 3534
  Synthetic polynucleotide

SEQ ID NO: 3536 - DNA, 190 bp, Artificial Sequence
  Synthetic polynucleotide
atcatctcaccttgcctcctgagcaagttggaaggagacctgcagggccgttatggcttcagagccgttatggcttctcggccgttatggcttcgacgccgttatggcttcctagccgttatggcttcactgccgttatggcttctgcgccgttatggcttcgtaggcgcgccatgcttcatcagactct

SEQ ID NO: 3537 - DNA, 190 bp, Artificial Sequence; identical to SEQ ID NO: 3536
  Synthetic polynucleotide

SEQ ID NO: 3538 - DNA, 156 bp, Artificial Sequence
  Synthetic polynucleotide
atcatctcaccttgcctcctgcacctgaacatagcggtcctgcaggccgccaaaagaccgccaaatcgccgccaaagacccgccaaactaccgccaaaactccgccaaatgcccgccaaagtaccgccaaaggcgcgccatgcttcatcagactct

SEQ ID NO: 3539 - DNA, 156 bp, Artificial Sequence; identical to SEQ ID NO: 3538
  Synthetic polynucleotide

SEQ ID NO: 3540 - DNA, 172 bp, Artificial Sequence
  Synthetic polynucleotide
atcatctcaccttgcctcctgcggcgcaatcgtcttgtcctgcaggaactctcgcgagaaactctcgcgtcgaactctcgcggacaactctcgcgctaaactctcgcgactaactctcgcgtgcaactctcgcggtaaactctcgcgggcgcgccatgcttcatcagactct

SEQ ID NO: 3541 - DNA, 172 bp, Artificial Sequence; identical to SEQ ID NO: 3540
  Synthetic polynucleotide

SEQ ID NO: 3542 - DNA, 164 bp, Artificial Sequence
  Synthetic polynucleotide
atcatctcaccttgcctcctgatggcctacgcatataacctgcaggacccggatcagaacccggatctcgacccggatcgacacccggatcctaacccggatcactacccggatctgcacccggatcgtaacccggatcggcgcgccatgcttcatcagactct

SEQ ID NO: 3543 - DNA, 164 bp, Artificial Sequence; identical to SEQ ID NO: 3542
  Synthetic polynucleotide

SEQ ID NO: 3544 - DNA, 156 bp, Artificial Sequence
  Synthetic polynucleotide
atcatctcaccttgcctcctgcgtcacttctctggcaacctgcaggaaaccacaagaaaaccacatcgaaaccacagacaaaccacactaaaaccacaactaaaccacatgcaaaccacagtaaaaccacaggcgcgccatgcttcatcagactct

SEQ ID NO: 3545 - DNA, 156 bp, Artificial Sequence; identical to SEQ ID NO: 3544
  Synthetic polynucleotide

SEQ ID NO: 3546 - DNA, 180 bp, Artificial Sequence
  Synthetic polynucleotide
atcatctcaccttgcctcctgaacacggtgcaatcagacctgcaggtgttaattgctagatgttaattgcttcgtgttaattgctgactgttaattgctctatgttaattgctacttgttaattgcttgctgttaattgctgtatgttaattgctggcgcgccatgcttcatcagactct

SEQ ID NO: 3547 - DNA, 180 bp, Artificial Sequence; identical to SEQ ID NO: 3546
  Synthetic polynucleotide

SEQ ID NO: 3548 - DNA, 156 bp, Artificial Sequence
  Synthetic polynucleotide
atcatctcaccttgcctcctgacctcccttggaagtttcctgcaggttaagtggagattaagtggtcgttaagtgggacttaagtggctattaagtggactttaagtggtgcttaagtgggtattaagtggggcgcgccatgcttcatcagactct

SEQ ID NO: 3549 - DNA, 156 bp, Artificial Sequence; identical to SEQ ID NO: 3548
  Synthetic polynucleotide

SEQ ID NO: 3550 - DNA, 197 bp, Artificial Sequence
  Synthetic polynucleotide
atcatctcaccttgcctcctgcctaggaattacgagcccctgcagggttcagtcatgcgtgacaagagttcagtcatgcgtgacatcggttcagtcatgcgtgacagacgttcagtcatgcgtgacactagttcagtcatgcgtgacaactgttcagtcatgcgtgacatgcggcgcgccatgcttcatcagactct

SEQ ID NO: 3551 - DNA, 197 bp, Artificial Sequence; identical to SEQ ID NO: 3550
  Synthetic polynucleotide

SEQ ID NO: 3552 - DNA, 185 bp, Artificial Sequence
  Synthetic polynucleotide
atcatctcaccttgcctcctgtcgagtgcaatccatagcctgcaggtttactcaattaacctagatttactcaattaaccttcgtttactcaattaacctgactttactcaattaacctctatttactcaattaacctacttttactcaattaaccttgcggcgcgccatgcttcatcagactct

SEQ ID NO: 3553 - DNA, 185 bp, Artificial Sequence; identical to SEQ ID NO: 3552
  Synthetic polynucleotide

SEQ ID NO: 3554 - DNA, 156 bp, Artificial Sequence
  Synthetic polynucleotide
atcatctcaccttgcctcctggggttaacattatcaggcctgcaggttaagtgcagattaagtgctcgttaagtgcgacttaagtgcctattaagtgcactttaagtgctgcttaagtgcgtattaagtgcggcgcgccatgcttcatcagactct

SEQ ID NO: 3555 - DNA, 156 bp, Artificial Sequence; identical to SEQ ID NO: 3554
  Synthetic polynucleotide

SEQ ID NO: 3556 - DNA, 197 bp, Artificial Sequence
  Synthetic polynucleotide
atcatctcaccttgcctcctgataactggattgggtaacctgcagggaacattctgttcttagagaacattctgttctttcggaacattctgttcttgacgaacattctgttcttctagaacattctgttcttactgaacattctgttctttgcgaacattctgttcttgtaggcgcgccatgcttcatcagactct

SEQ ID NO: 3557 - DNA, 197 bp, Artificial Sequence; identical to SEQ ID NO: 3556
  Synthetic polynucleotide

SEQ ID NO: 3558 - DNA, 172 bp, Artificial Sequence
  Synthetic polynucleotide
atcatctcaccttgcctcctgtagttgaagatcactcccctgcaggcccccccacaagacccccccacatcgcccccccacagaccccccccacactacccccccacaactcccccccacatgccccccccacagtacccccccacaggcgcgccatgcttcatcagactct

SEQ ID NO: 3559 - DNA, 172 bp, Artificial Sequence; identical to SEQ ID NO: 3558
  Synthetic polynucleotide

SEQ ID NO: 3560 - DNA, 172 bp, Artificial Sequence
  Synthetic polynucleotide
atcatctcaccttgcctcctggcaacacaatcaccctacctgcaggtctataaaagagatctataaaagtcgtctataaaaggactctataaaagctatctataaaagacttctataaaagtgctctataaaaggtatctataaaagggcgcgccatgcttcatcagactct

SEQ ID NO: 3561 - DNA, 172 bp, Artificial Sequence; identical to SEQ ID NO: 3560
  Synthetic polynucleotide

SEQ ID NO: 3562 - DNA, 196 bp, Artificial Sequence
  Synthetic polynucleotide
atcatctcaccttgcctcctgatgcattagcccaagctcctgcagggccctctagtggcagagccctctagtggctcggccctctagtggcgacgccctctagtggcctagccctctagtggcactgccctctagtggctgcgccctctagtggcgtagccctctagtggcggcgcgccatgcttcatcagactct

SEQ ID NO: 3563 - DNA, 196 bp, Artificial Sequence; identical to SEQ ID NO: 3562
  Synthetic polynucleotide

SEQ ID NO: 3564 - DNA, 164 bp, Artificial Sequence
  Synthetic polynucleotide
atcatctcaccttgcctcctgactcaaccgaagtcctccctgcaggaccacttaaagaaccacttaatcgaccacttaagacaccacttaactaaccacttaaactaccacttaatgcaccacttaagtaaccacttaaggcgcgccatgcttcatcagactct

SEQ ID NO: 3565 - DNA, 164 bp, Artificial Sequence; identical to SEQ ID NO: 3564
  Synthetic polynucleotide

SEQ ID NO: 3566 - DNA, 164 bp, Artificial Sequence
  Synthetic polynucleotide
atcatctcaccttgcctcctggttattataggacgtcgcctgcagggcacgcaacagagcacgcaactcggcacgcaacgacgcacgcaacctagcacgcaacactgcacgcaactgcgcacgcaacgtagcacgcaacggcgcgccatgcttcatcagactct

SEQ ID NO: 3567 - DNA, 164 bp, Artificial Sequence; identical to SEQ ID NO: 3566
  Synthetic polynucleotide

SEQ ID NO: 3568 - DNA, 180 bp, Artificial Sequence
  Synthetic polynucleotide
atcatctcaccttgcctcctgtacggtcctgctcaaagcctgcaggcacgtggttccagacacgtggttcctcgcacgtggttccgaccacgtggttccctacacgtggttccactcacgtggttcctgccacgtggttccgtacacgtggttccggcgcgccatgcttcatcagactct

SEQ ID NO: 3569 - DNA, 180 bp, Artificial Sequence; identical to SEQ ID NO: 3568
  Synthetic polynucleotide

SEQ ID NO: 3570 - DNA, 197 bp, Artificial Sequence
  Synthetic polynucleotide
atcatctcaccttgcctcctgtaccatatgggacccatcctgcagggagtgggggcgggagagagagtgggggcgggagtcggagtgggggcgggaggacgagtgggggcgggagctagagtgggggcgggagactgagtgggggcgggagtgcgagtgggggcgggaggtaggcgcgccatgcttcatcagactct

SEQ ID NO: 3571 - DNA, 197 bp, Artificial Sequence; identical to SEQ ID NO: 3570
  Synthetic polynucleotide

SEQ ID NO: 3572 - DNA, 197 bp, Artificial Sequence
  Synthetic polynucleotide
atcatctcaccttgcctcctgtctccaagaatgctcggcctgcagggaccccccgctgcgcagagaccccccgctgcgctcggaccccccgctgcgcgacgaccccccgctgcgcctagaccccccgctgcgcactgaccccccgctgcgctgcgaccccccgctgcgcgtaggcgcgccatgcttcatcagactct

SEQ ID NO: 3573 - DNA, 197 bp, Artificial Sequence; identical to SEQ ID NO: 3572
  Synthetic polynucleotide

SEQ ID NO: 3574 - DNA, 191 bp, Artificial Sequence
  Synthetic polynucleotide
atcatctcaccttgcctcctgtgagcctagtcgattaccctgcaggcaaattaattaaaaactagacaaattaattaaaaacttcgcaaattaattaaaaactgaccaaattaattaaaaactctacaaattaattaaaaactactcaaattaattaaaaacttgcggcgcgccatgcttcatcagactct

SEQ ID NO: 3575 - DNA, 191 bp, Artificial Sequence; identical to SEQ ID NO: 3574
  Synthetic polynucleotide

SEQ ID NO: 3576 - DNA, 191 bp, Artificial Sequence
  Synthetic polynucleotide
atcatctcaccttgcctcctgtgttgttcagccttactcctgcaggaaccgctaattagtggaagaaaccgctaattagtggatcgaaccgctaattagtggagacaaccgctaattagtggactaaaccgctaattagtggaactaaccgctaattagtggatgcggcgcgccatgcttcatcagactct

SEQ ID NO: 3577 - DNA, 191 bp, Artificial Sequence; identical to SEQ ID NO: 3576
  Synthetic polynucleotide

SEQ ID NO: 3578 - DNA, 197 bp, Artificial Sequence
  Synthetic polynucleotide
atcatctcaccttgcctcctggtgcatcccgttaattgcctgcaggatcaatgttattgatagaatcaatgttattgattcgatcaatgttattgatgacatcaatgttattgatctaatcaatgttattgatactatcaatgttattgattgcatcaatgttattgatgtaggcgcgccatgcttcatcagactct

SEQ ID NO: 3579 - DNA, 197 bp, Artificial Sequence; identical to SEQ ID NO: 3578
  Synthetic polynucleotide

SEQ ID NO: 3580 - DNA, 180 bp, Artificial Sequence
  Synthetic polynucleotide
atcatctcaccttgcctcctgctccgcttaacaagcaacctgcaggtgtaaacaggaagatgtaaacaggatcgtgtaaacaggagactgtaaacaggactatgtaaacaggaacttgtaaacaggatgctgtaaacaggagtatgtaaacaggaggcgcgccatgcttcatcagactct

SEQ ID NO: 3581 - DNA, 180 bp, Artificial Sequence; identical to SEQ ID NO: 3580
  Synthetic polynucleotide

SEQ ID NO: 3582 - DNA, 164 bp, Artificial Sequence
  Synthetic polynucleotide
atcatctcaccttgcctcctgttgaagaacgtgaggcacctgcaggcggccatctagacggccatcttcgcggccatctgaccggccatctctacggccatctactcggccatcttgccggccatctgtacggccatctggcgcgccatgcttcatcagactct

SEQ ID NO: 3583 - DNA, 164 bp, Artificial Sequence; identical to SEQ ID NO: 3582
  Synthetic polynucleotide

SEQ ID NO: 3584 - DNA, 197 bp, Artificial Sequence
  Synthetic polynucleotide
atcatctcaccttgcctcctgtaacctagagcacacaccctgcaggccatataaggagatgagaccatataaggagatgtcgccatataaggagatggacccatataaggagatgctaccatataaggagatgactccatataaggagatgtgcccatataaggagatggtaggcgcgccatgcttcatcagactct

SEQ ID NO: 3585 - DNA, 197 bp, Artificial Sequence; identical to SEQ ID NO: 3584
  Synthetic polynucleotide

SEQ ID NO: 3586 - DNA, 190 bp, Artificial Sequence
  Synthetic polynucleotide
atcatctcaccttgcctcctgctgaaaggatgcgcacacctgcaggattttccgtaaaatagaattttccgtaaaattcgattttccgtaaaatgacattttccgtaaaatctaattttccgtaaaatactattttccgtaaaattgcattttccgtaaaatgtaggcgcgccatgcttcatcagactct

SEQ ID NO: 3587 - DNA, 190 bp, Artificial Sequence; identical to SEQ ID NO: 3586
  Synthetic polynucleotide

SEQ ID NO: 3588 - DNA, 190 bp, Artificial Sequence
  Synthetic polynucleotide
atcatctcaccttgcctcctggatgtgaatgagacatacctgcaggagttactaggcaaaagaagttactaggcaaatcgagttactaggcaaagacagttactaggcaaactaagttactaggcaaaactagttactaggcaaatgcagttactaggcaaagtaggcgcgccatgcttcatcagactct

SEQ ID NO: 3589 - DNA, 190 bp, Artificial Sequence; identical to SEQ ID NO: 3588
  Synthetic polynucleotide

SEQ ID NO: 3590 - DNA, 186 bp, Artificial Sequence
  Synthetic polynucleotide
atcatctcaccttgcctcctgctctatagctacctgttcctgcaggtaaaggaaagccaaaagtgaagataaaggaaagccaaaagtgatcgtaaaggaaagccaaaagtgagactaaaggaaagccaaaagtgactataaaggaaagccaaaagtgaactggcgcgccatgcttcatcagactct

SEQ ID NO: 3591 - DNA, 186 bp, Artificial Sequence; identical to SEQ ID NO: 3590
  Synthetic polynucleotide

SEQ ID NO: 3592 - DNA, 191 bp, Artificial Sequence
  Synthetic polynucleotide
atcatctcaccttgcctcctggtcgcgtgcaattgactcctgcaggggccgttataaccgttaagaggccgttataaccgttatcgggccgttataaccgttagacggccgttataaccgttactaggccgttataaccgttaactggccgttataaccgttatgcggcgcgccatgcttcatcagactct

SEQ ID NO: 3593 - DNA, 191 bp, Artificial Sequence; identical to SEQ ID NO: 3592
  Synthetic polynucleotide

SEQ ID NO: 3594 - DNA, 197 bp, Artificial Sequence
  Synthetic polynucleotide
atcatctcaccttgcctcctgttggagctaggatagaccctgcaggcagcatgactcagcaagacagcatgactcagcatcgcagcatgactcagcagaccagcatgactcagcactacagcatgactcagcaactcagcatgactcagcatgccagcatgactcagcagtaggcgcgccatgcttcatcagactct

SEQ ID NO: 3595 - DNA, 197 bp, Artificial Sequence; identical to SEQ ID NO: 3594
  Synthetic polynucleotide

SEQ ID NO: 3596 - DNA, 180 bp, Artificial Sequence
  Synthetic polynucleotide
atcatctcaccttgcctcctgccagtcgaattcaataacctgcaggaccacttgaaaagaaccacttgaaatcgaccacttgaaagacaccacttgaaactaaccacttgaaaactaccacttgaaatgcaccacttgaaagtaaccacttgaaaggcgcgccatgcttcatcagactct

SEQ ID NO: 3597 - DNA, 180 bp, Artificial Sequence; identical to SEQ ID NO: 3596
  Synthetic polynucleotide

SEQ ID NO: 3598 - DNA, 191 bp, Artificial Sequence
  Synthetic polynucleotide
atcatctcaccttgcctcctgatgggcctgtactcatccctgcagggtaattaattaaataatagagtaattaattaaataattcggtaattaattaaataatgacgtaattaattaaataatctagtaattaattaaataatactgtaattaattaaataattgcggcgcgccatgcttcatcagactct

SEQ ID NO: 3599 - DNA, 191 bp, Artificial Sequence; identical to SEQ ID NO: 3598
  Synthetic polynucleotide

SEQ ID NO: 3600 - DNA, 188 bp, Artificial Sequence
  Synthetic polynucleotide
atcatctcaccttgcctcctgctcgaccagttaagaaccctgcaggtgctgactcagcagatgctgactcagctcgtgctgactcagcgactgctgactcagcctatgctgactcagcacttgctgactcagctgctgctgactcagcgtatgctgactcagcggcgcgccatgcttcatcagactct

SEQ ID NO: 3601 - DNA, 188 bp, Artificial Sequence; identical to SEQ ID NO: 3600
  Synthetic polynucleotide

SEQ ID NO: 3602 - DNA, 185 bp, Artificial Sequence
  Synthetic polynucleotide
atcatctcaccttgcctcctgcgataaatctgcgcaagcctgcaggcgttggggattagcctagacgttggggattagccttcgcgttggggattagcctgaccgttggggattagcctctacgttggggattagcctactcgttggggattagccttgcggcgcgccatgcttcatcagactct

SEQ ID NO: 3603 - DNA, 185 bp, Artificial Sequence; identical to SEQ ID NO: 3602
  Synthetic polynucleotide

SEQ ID NO: 3604 - DNA, 191 bp, Artificial Sequence
  Synthetic polynucleotide
atcatctcaccttgcctcctgtaccttagggcgttgaccctgcagggtgttacttcctgtggcagagtgttacttcctgtggctcggtgttacttcctgtggcgacgtgttacttcctgtggcctagtgttacttcctgtggcactgtgttacttcctgtggctgcggcgcgccatgcttcatcagactct

SEQ ID NO: 3605 - DNA, 191 bp, Artificial Sequence; identical to SEQ ID NO: 3604
  Synthetic polynucleotide

SEQ ID NO: 3606 - DNA, 190 bp, Artificial Sequence
  Synthetic polynucleotide
atcatctcaccttgcctcctggaaccgggtcataaccacctgcaggtatgtgttgtggttagatatgtgttgtggtttcgtatgtgttgtggttgactatgtgttgtggttctatatgtgttgtggttacttatgtgttgtggtttgctatgtgttgtggttgtaggcgcgccatgcttcatcagactct

SEQ ID NO: 3607 - DNA, 190 bp, Artificial Sequence; identical to SEQ ID NO: 3606
  Synthetic polynucleotide

SEQ ID NO: 3608 - DNA, 180 bp, Artificial Sequence
  Synthetic polynucleotide
atcatctcaccttgcctcctgagtcgtagtcggatgagcctgcaggtcttatctcccagatcttatctccctcgtcttatctcccgactcttatctcccctatcttatctcccacttcttatctccctgctcttatctcccgtatcttatctcccggcgcgccatgcttcatcagactct

SEQ ID NO: 3609 - DNA, 180 bp, Artificial Sequence; identical to SEQ ID NO: 3608
  Synthetic polynucleotide

SEQ ID NO: 3610 - DNA, 188 bp, Artificial Sequence
  Synthetic polynucleotide
atcatctcaccttgcctcctgggtacagtacccatacccctgcaggggggggggggcgagaggggggggggcgtcgggggggggggcggacggggggggggcgctaggggggggggcgactggggggggggcgtgcggggggggggcggtaggggggggggcgggcgcgccatgcttcatcagactct

SEQ ID NO: 3611 - DNA, 188 bp, Artificial Sequence; identical to SEQ ID NO: 3610
  Synthetic polynucleotide

SEQ ID NO: 3612 - DNA, 197 bp, Artificial Sequence
  Synthetic polynucleotide
atcatctcaccttgcctcctgtcatgagtcctccataccctgcaggggcgctgtccatggtagaggcgctgtccatggttcgggcgctgtccatggtgacggcgctgtccatggtctaggcgctgtccatggtactggcgctgtccatggttgcggcgctgtccatggtgtaggcgcgccatgcttcatcagactct

SEQ ID NO: 3613 - DNA, 197 bp, Artificial Sequence; identical to SEQ ID NO: 3612
  Synthetic polynucleotide

SEQ ID NO: 3614 - DNA, 172 bp, Artificial Sequence
  Synthetic polynucleotide
atcatctcaccttgcctcctgcttaagggcacacgagccctgcaggcgctatccgcagacgctatccgctcgcgctatccgcgaccgctatccgcctacgctatccgcactcgctatccgctgccgctatccgcgtacgctatccgcggcgcgccatgcttcatcagactct

SEQ ID NO: 3615 - DNA, 172 bp, Artificial Sequence; identical to SEQ ID NO: 3614
  Synthetic polynucleotide

SEQ ID NO: 3616 - DNA, 200 bp, Artificial Sequence
  Synthetic polynucleotide
atcatctcaccttgcctcctgttaaatacctggcctcacctgcaggccgaaatttgcatattgatagaccgaaatttgcatattgattcgccgaaatttgcatattgatgacccgaaatttgcatattgatctaccgaaatttgcatattgatactccgaaatttgcatattgatggcgcgccatgcttcatcagactct

SEQ ID NO: 3617 - DNA, 200 bp, Artificial Sequence; identical to SEQ ID NO: 3616
  Synthetic polynucleotide

SEQ ID NO: 3618 - DNA, 197 bp, Artificial Sequence
  Synthetic polynucleotide
atcatctcaccttgcctcctggtgctccaaattccaatcctgcaggttggcacagtgccagagattggcacagtgccagtcgttggcacagtgccaggacttggcacagtgccagctattggcacagtgccagactttggcacagtgccagtgcttggcacagtgccaggtaggcgcgccatgcttcatcagactct

SEQ ID NO: 3619 - DNA, 197 bp, Artificial Sequence; identical to SEQ ID NO: 3618
  Synthetic polynucleotide

SEQ ID NO: 3620 - DNA, 140 bp, Artificial Sequence
  Synthetic polynucleotide
atcatctcaccttgcctcctggagctcgggaactctaacctgcaggattgttagaattgtttcgattgttgacattgttctaattgttactattgtttgcattgttgtaattgttggcgcgccatgcttcatcagactct

SEQ ID NO: 3621 - DNA, 140 bp, Artificial Sequence; identical to SEQ ID NO: 3620
  Synthetic polynucleotide

SEQ ID NO: 3622 - DNA, 185 bp, Artificial Sequence
  Synthetic polynucleotide
atcatctcaccttgcctcctgtaacccggtaccacaggcctgcaggtaacggttttaacggtagataacggttttaacggttcgtaacggttttaacggtgactaacggttttaacggtctataacggttttaacggtacttaacggttttaacggttgcggcgcgccatgcttcatcagactct

SEQ ID NO: 3623 - DNA, 185 bp, Artificial Sequence; identical to SEQ ID NO: 3622
  Synthetic polynucleotide

SEQ ID NO: 3624 - DNA, 200 bp, Artificial Sequence
  Synthetic polynucleotide
atcatctcaccttgcctcctgaagcatcgctggactcgcctgcaggcaaggtcatttcaaggtcaagacaaggtcatttcaaggtcatcgcaaggtcatttcaaggtcagaccaaggtcatttcaaggtcactacaaggtcatttcaaggtcaactcaaggtcatttcaaggtcaggcgcgccatgcttcatcagactct

SEQ ID NO: 3625 - DNA, 200 bp, Artificial Sequence; identical to SEQ ID NO: 3624
  Synthetic polynucleotide

SEQ ID NO: 3626 - DNA, 191 bp, Artificial Sequence
  Synthetic polynucleotide
atcatctcaccttgcctcctgacaagaatcccgtattacctgcaggatgtttacggtaaacaaagaatgtttacggtaaacaatcgatgtttacggtaaacaagacatgtttacggtaaacaactaatgtttacggtaaacaaactatgtttacggtaaacaatgcggcgcgccatgcttcatcagactct

SEQ ID NO: 3627 - DNA, 191 bp, Artificial Sequence; identical to SEQ ID NO: 3626
  Synthetic polynucleotide

SEQ ID NO: 3628 - DNA, 156 bp, Artificial Sequence
  Synthetic polynucleotide
atcatctcaccttgcctcctggaggccagaggattagccctgcaggttgctgacagattgctgactcgttgctgacgacttgctgacctattgctgacactttgctgactgcttgctgacgtattgctgacggcgcgccatgcttcatcagactct

SEQ ID NO: 3629 - DNA, 156 bp, Artificial Sequence; identical to SEQ ID NO: 3628
  Synthetic polynucleotide

SEQ ID NO: 3630 - DNA, 172 bp, Artificial Sequence
  Synthetic polynucleotide
atcatctcaccttgcctcctggcatactccacgaactgcctgcagggaccgaaaccagagaccgaaacctcggaccgaaaccgacgaccgaaaccctagaccgaaaccactgaccgaaacctgcgaccgaaaccgtagaccgaaaccggcgcgccatgcttcatcagactct

SEQ ID NO: 3631 - DNA, 172 bp, Artificial Sequence; identical to SEQ ID NO: 3630
  Synthetic polynucleotide

SEQ ID NO: 3632 - DNA, 191 bp, Artificial Sequence
  Synthetic polynucleotide
atcatctcaccttgcctcctgcggactcatgtaactggcctgcaggctggggggggcagataaggcaagactggggggggcagataaggcatcgctggggggggcagataaggcagacctggggggggcagataaggcactactggggggggcagataaggcaactggcgcgccatgcttcatcagactct

SEQ ID NO: 3633 - DNA, 191 bp, Artificial Sequence; identical to SEQ ID NO: 3632
  Synthetic polynucleotide

SEQ ID NO: 3634 - DNA, 172 bp, Artificial Sequence
  Synthetic polynucleotide
atcatctcaccttgcctcctgaatttggatgtatccaccctgcaggagatattatcagaagatattatctcgagatattatcgacagatattatcctaagatattatcactagatattatctgcagatattatcgtaagatattatcggcgcgccatgcttcatcagactct

SEQ ID NO: 3635 - DNA, 172 bp, Artificial Sequence; identical to SEQ ID NO: 3634
  Synthetic polynucleotide

SEQ ID NO: 3636 - DNA, 197 bp, Artificial Sequence
  Synthetic polynucleotide
atcatctcaccttgcctcctgtggcttgccagtttacccctgcaggcctctccctcctcccagacctctccctcctccctcgcctctccctcctcccgaccctctccctcctcccctacctctccctcctcccactcctctccctcctccctgccctctccctcctcccgtaggcgcgccatgcttcatcagactct

SEQ ID NO: 3637 - DNA, 197 bp, Artificial Sequence; identical to SEQ ID NO: 3636
  Synthetic polynucleotide

SEQ ID NO: 3638 - DNA, 188 bp, Artificial Sequence
  Synthetic polynucleotide
atcatctcaccttgcctcctgacttaacgcaccctgaccctgcaggaagatcaaagggagaaagatcaaagggtcgaagatcaaaggggacaagatcaaagggctaaagatcaaagggactaagatcaaagggtgcaagatcaaaggggtaaagatcaaagggggcgcgccatgcttcatcagactct

SEQ ID NO: 3639 - DNA, 188 bp, Artificial Sequence; identical to SEQ ID NO: 3638
  Synthetic polynucleotide

SEQ ID NO: 3640 - DNA, 185 bp, Artificial Sequence
  Synthetic polynucleotide
atcatctcaccttgcctcctgatccgctcagttgcaagcctgcaggttgcattaattactacagattgcattaattactactcgttgcattaattactacgacttgcattaattactacctattgcattaattactacactttgcattaattactactgcggcgcgccatgcttcatcagactct

SEQ ID NO: 3641 - DNA, 185 bp, Artificial Sequence; identical to SEQ ID NO: 3640
  Synthetic polynucleotide

SEQ ID NO: 3642 - DNA, 148 bp, Artificial Sequence
  Synthetic polynucleotide
atcatctcaccttgcctcctgtgtgccagatcttgcatcctgcaggttagcggagattagcggtcgttagcgggacttagcggctattagcggactttagcggtgcttagcgggtattagcggggcgcgccatgcttcatcagactct

SEQ ID NO: 3643 - DNA, 148 bp, Artificial Sequence; identical to SEQ ID NO: 3642
  Synthetic polynucleotide

SEQ ID NO: 3644 - DNA, 190 bp, Artificial Sequence
  Synthetic polynucleotide
atcatctcaccttgcctcctggttcgcatttacgtttccctgcaggcagccaatcagcgcagacagccaatcagcgctcgcagccaatcagcgcgaccagccaatcagcgcctacagccaatcagcgcactcagccaatcagcgctgccagccaatcagcgcgtaggcgcgccatgcttcatcagactct

SEQ ID NO: 3645 - DNA, 190 bp, Artificial Sequence; identical to SEQ ID NO: 3644
  Synthetic polynucleotide

SEQ ID NO: 3646 - DNA, 191 bp, Artificial Sequence
  Synthetic polynucleotide
atcatctcaccttgcctcctgactagccgaaccctgctcctgcaggttacacttccggtattgagattacacttccggtattgtcgttacacttccggtattggacttacacttccggtattgctattacacttccggtattgactttacacttccggtattgtgcggcgcgccatgcttcatcagactct

SEQ ID NO: 3647 - DNA, 191 bp, Artificial Sequence; identical to SEQ ID NO: 3646
  Synthetic polynucleotide

SEQ ID NO: 3648 - DNA, 190 bp, Artificial Sequence
  Synthetic polynucleotide
atcatctcaccttgcctcctgaccattgggcatggacccctgcaggaaaaaatcaataaaagaaaaaaatcaataaatcgaaaaaatcaataaagacaaaaaatcaataaactaaaaaaatcaataaaactaaaaaatcaataaatgcaaaaaatcaataaagtaggcgcgccatgcttcatcagactct

SEQ ID NO: 3649 - DNA, 190 bp, Artificial Sequence; identical to SEQ ID NO: 3648
  Synthetic polynucleotide

SEQ ID NO: 3650 - DNA, 185 bp, Artificial Sequence
  Synthetic polynucleotide
atcatctcaccttgcctcctgctcaaattctatccggccctgcagggccccgctgccgccgcagagccccgctgccgccgctcggccccgctgccgccgcgacgccccgctgccgccgcctagccccgctgccgccgcactgccccgctgccgccgctgcggcgcgccatgcttcatcagactct

SEQ ID NO: 3651 - DNA, 185 bp, Artificial Sequence; identical to SEQ ID NO: 3650
  Synthetic polynucleotide

SEQ ID NO: 3652 - DNA, 197 bp, Artificial Sequence
  Synthetic polynucleotide
atcatctcaccttgcctcctgaccttacgcacattaatcctgcaggtaaattgattgatggagataaattgattgatggtcgtaaattgattgatgggactaaattgattgatggctataaattgattgatggacttaaattgattgatggtgctaaattgattgatgggtaggcgcgccatgcttcatcagactct

SEQ ID NO: 3653 - DNA, 197 bp, Artificial Sequence; identical to SEQ ID NO: 3652
  Synthetic polynucleotide

SEQ ID NO: 3654 - DNA, 200 bp, Artificial Sequence
  Synthetic polynucleotide
atcatctcaccttgcctcctggtactttatagccgacgcctgcaggccacggcggtgtcacatgcagaccacggcggtgtcacatgctcgccacggcggtgtcacatgcgacccacggcggtgtcacatgcctaccacggcggtgtcacatgcactccacggcggtgtcacatgcggcgcgccatgcttcatcagactct

SEQ ID NO: 3655 - DNA, 200 bp, Artificial Sequence; identical to SEQ ID NO: 3654
  Synthetic polynucleotide

SEQ ID NO: 3656 - DNA, 185 bp, Artificial Sequence
  Synthetic polynucleotide
atcatctcaccttgcctcctggctgagcacgcaagttgcctgcaggaattattgaattgattagaaattattgaattgatttcgaattattgaattgattgacaattattgaattgattctaaattattgaattgattactaattattgaattgatttgcggcgcgccatgcttcatcagactct

SEQ ID NO: 3657 - DNA, 185 bp, Artificial Sequence; identical to SEQ ID NO: 3656
  Synthetic polynucleotide

SEQ ID NO: 3658 - DNA, 196 bp, Artificial Sequence
  Synthetic polynucleotide
atcatctcaccttgcctcctgccgaaccgtcatgctagcctgcaggttaaaaatatgcataatcagtaagattaaaaatatgcataatcagtatcgttaaaaatatgcataatcagtagacttaaaaatatgcataatcagtactattaaaaatatgcataatcagtaactggcgcgccatgcttcatcagactct

SEQ ID NO: 3659 - DNA, 196 bp, Artificial Sequence; identical to SEQ ID NO: 3658
  Synthetic polynucleotide

SEQ ID NO: 3660 - DNA, 200 bp, Artificial Sequence
  Synthetic polynucleotide
atcatctcaccttgcctcctgaatgttgatcggtgagtcctgcaggccgaaatttgcatattgaaagaccgaaatttgcatattgaatcgccgaaatttgcatattgaagacccgaaatttgcatattgaactaccgaaatttgcatattgaaactccgaaatttgcatattgaaggcgcgccatgcttcatcagactct

SEQ ID NO: 3661 - DNA, 200 bp, Artificial Sequence; identical to SEQ ID NO: 3660
  Synthetic polynucleotide

SEQ ID NO: 3662 - DNA, 180 bp, Artificial Sequence
  Synthetic polynucleotide
atcatctcaccttgcctcctgtgaactagcccagacttcctgcaggtgatttgcataagatgatttgcatatcgtgatttgcatagactgatttgcatactatgatttgcataacttgatttgcatatgctgatttgcatagtatgatttgcataggcgcgccatgcttcatcagactct

SEQ ID NO: 3663 - DNA, 180 bp, Artificial Sequence; identical to SEQ ID NO: 3662
  Synthetic polynucleotide

SEQ ID NO: 3664 - DNA, 156 bp, Artificial Sequence
  Synthetic polynucleotide
atcatctcaccttgcctcctggtgcgcatcaaataggtcctgcaggccactagaagaccactagatcgccactagagacccactagactaccactagaactccactagatgcccactagagtaccactagaggcgcgccatgcttcatcagactct

SEQ ID NO: 3665 - DNA, 156 bp, Artificial Sequence; identical to SEQ ID NO: 3664
  Synthetic polynucleotide

SEQ ID NO: 3666 - DNA, 188 bp, Artificial Sequence
  Synthetic polynucleotide
atcatctcaccttgcctcctgtagtcgcgagggagcaacctgcaggctgcacctgtgcagactgcacctgtgctcgctgcacctgtgcgacctgcacctgtgcctactgcacctgtgcactctgcacctgtgctgcctgcacctgtgcgtactgcacctgtgcggcgcgccatgcttcatcagactct

SEQ ID NO: 3667 - DNA, 188 bp, Artificial Sequence; identical to SEQ ID NO: 3666
  Synthetic polynucleotide

SEQ ID NO: 3668 - DNA, 180 bp, Artificial Sequence
  Synthetic polynucleotide
atcatctcaccttgcctcctgagtcggctatattggcacctgcaggcaacaggtggtagacaacaggtggttcgcaacaggtggtgaccaacaggtggtctacaacaggtggtactcaacaggtggttgccaacaggtggtgtacaacaggtggtggcgcgccatgcttcatcagactct

SEQ ID NO: 3669 - DNA, 180 bp, Artificial Sequence; identical to SEQ ID NO: 3668
  Synthetic polynucleotide

SEQ ID NO: 3670 - DNA, 180 bp, Artificial Sequence
  Synthetic polynucleotide
atcatctcaccttgcctcctgagtgggtaatgattcctcctgcaggtttcccgccccagatttcccgcccctcgtttcccgccccgactttcccgccccctatttcccgccccacttttcccgcccctgctttcccgccccgtatttcccgccccggcgcgccatgcttcatcagactct

SEQ ID NO: 3671 - DNA, 180 bp, Artificial Sequence; identical to SEQ ID NO: 3670
  Synthetic polynucleotide

SEQ ID NO: 3672 - DNA, 197 bp, Artificial Sequence
  Synthetic polynucleotide
atcatctcaccttgcctcctgattacatagcgcgaaaccctgcaggctaattggcaattaaagactaattggcaattaatcgctaattggcaattaagacctaattggcaattaactactaattggcaattaaactctaattggcaattaatgcctaattggcaattaagtaggcgcgccatgcttcatcagactct

SEQ ID NO: 3673 - DNA, 197 bp, Artificial Sequence; identical to SEQ ID NO: 3672
  Synthetic polynucleotide

SEQ ID NO: 3674 - DNA, 185 bp, Artificial Sequence
  Synthetic polynucleotide
atcatctcaccttgcctcctgcctttgcttcatagtatcctgcaggaattgagtgggcgtagagaaattgagtgggcgtagtcgaattgagtgggcgtaggacaattgagtgggcgtagctaaattgagtgggcgtagactaattgagtgggcgtagtgcggcgcgccatgcttcatcagactct

SEQ ID NO: 3675 - DNA, 185 bp, Artificial Sequence; identical to SEQ ID NO: 3674
  Synthetic polynucleotide

SEQ ID NO: 3676 - DNA, 185 bp, Artificial Sequence
  Synthetic polynucleotide
atcatctcaccttgcctcctgctttagggtgtgacttacctgcagggcgggcacgtgacaacagagcgggcacgtgacaactcggcgggcacgtgacaacgacgcgggcacgtgacaacctagcgggcacgtgacaacactgcgggcacgtgacaactgcggcgcgccatgcttcatcagactct

SEQ ID NO: 3677 - DNA, 185 bp, Artificial Sequence; identical to SEQ ID NO: 3676
  Synthetic polynucleotide

SEQ ID NO: 3678 - DNA, 197 bp, Artificial Sequence
  Synthetic polynucleotide
atcatctcaccttgcctcctgaaaccgaggattcagagcctgcaggtaggggatttcccagagataggggatttcccagtcgtaggggatttcccaggactaggggatttcccagctataggggatttcccagacttaggggatttcccagtgctaggggatttcccaggtaggcgcgccatgcttcatcagactct

SEQ ID NO: 3679 - DNA, 197 bp, Artificial Sequence; identical to SEQ ID NO: 3678
  Synthetic polynucleotide

SEQ ID NO: 3680 - DNA, 197 bp, Artificial Sequence
  Synthetic polynucleotide
atcatctcaccttgcctcctgggagaacctacagtcaccctgcagggaaaaggtgtgaaagagagaaaaggtgtgaaagtcggaaaaggtgtgaaaggacgaaaaggtgtgaaagctagaaaaggtgtgaaagactgaaaaggtgtgaaagtgcgaaaaggtgtgaaaggtaggcgcgccatgcttcatcagactct

SEQ ID NO: 3681 - DNA, 197 bp, Artificial Sequence; identical to SEQ ID NO: 3680
  Synthetic polynucleotide

SEQ ID NO: 3682 - DNA, 190 bp, Artificial Sequence
  Synthetic polynucleotide
atcatctcaccttgcctcctgggtagctataatgaactcctgcagggtgttgtttacgttagagtgttgtttacgtttcggtgttgtttacgttgacgtgttgtttacgttctagtgttgtttacgttactgtgttgtttacgtttgcgtgttgtttacgttgtaggcgcgccatgcttcatcagactct

SEQ ID NO: 3683 - DNA, 190 bp, Artificial Sequence; identical to SEQ ID NO: 3682
  Synthetic polynucleotide

SEQ ID NO: 3684 - DNA, 148 bp, Artificial Sequence
  Synthetic polynucleotide
atcatctcaccttgcctcctgataaagtacgtgttagccctgcaggttacgtaagattacgtatcgttacgtagacttacgtactattacgtaactttacgtatgcttacgtagtattacgtaggcgcgccatgcttcatcagactct

SEQ ID NO: 3685 - DNA, 148 bp, Artificial Sequence; identical to SEQ ID NO: 3684
  Synthetic polynucleotide

SEQ ID NO: 3686 - DNA, 172 bp, Artificial Sequence
  Synthetic polynucleotide
atcatctcaccttgcctcctggcgacgcgcatctataccctgcaggacacgcccctagaacacgccccttcgacacgcccctgacacacgcccctctaacacgcccctactacacgccccttgcacacgcccctgtaacacgcccctggcgcgccatgcttcatcagactct

SEQ ID NO: 3687 - DNA, 172 bp, Artificial Sequence; identical to SEQ ID NO: 3686
  Synthetic polynucleotide

SEQ ID NO: 3688 - DNA, 164 bp, Artificial Sequence
  Synthetic polynucleotide
atcatctcaccttgcctcctgtcctgtcttacggctctcctgcaggttgcggtttagattgcggttttcgttgcggtttgacttgcggtttctattgcggtttactttgcggttttgcttgcggtttgtattgcggtttggcgcgccatgcttcatcagactct

SEQ ID NO: 3689 - DNA, 164 bp, Artificial Sequence; identical to SEQ ID NO: 3688
  Synthetic polynucleotide

SEQ ID NO: 3690 - DNA, 156 bp, Artificial Sequence
  Synthetic polynucleotide
atcatctcaccttgcctcctgcacccagcgcgaactaacctgcaggggcttcccagaggcttccctcgggcttcccgacggcttcccctaggcttcccactggcttccctgcggcttcccgtaggcttcccggcgcgccatgcttcatcagactct

SEQ ID NO: 3691 - DNA, 156 bp, Artificial Sequence; identical to SEQ ID NO: 3690
  Synthetic polynucleotide

SEQ ID NO: 3692 - DNA, 197 bp, Artificial Sequence
  Synthetic polynucleotide
atcatctcaccttgcctcctgacacaacgtttcagagccctgcagggtttcacttcctcttagagtttcacttcctctttcggtttcacttcctcttgacgtttcacttcctcttctagtttcacttcctcttactgtttcacttcctctttgcgtttcacttcctcttgtaggcgcgccatgcttcatcagactct

SEQ ID NO: 3693 - DNA, 197 bp, Artificial Sequence; identical to SEQ ID NO: 3692
  Synthetic polynucleotide

SEQ ID NO: 3694 - DNA, 190 bp, Artificial Sequence
  Synthetic polynucleotide
atcatctcaccttgcctcctgtcagtgaaggacgctgccctgcaggtttccaggaaatggagatttccaggaaatggtcgtttccaggaaatgggactttccaggaaatggctatttccaggaaatggacttttccaggaaatggtgctttccaggaaatgggtaggcgcgccatgcttcatcagactct

SEQ ID NO: 3695 - DNA, 190 bp, Artificial Sequence; identical to SEQ ID NO: 3694
  Synthetic polynucleotide

SEQ ID NO: 3696 - DNA, 164 bp, Artificial Sequence
  Synthetic polynucleotide
atcatctcaccttgcctcctgtatcggctgaatttacccctgcaggctgttgccaagactgttgccatcgctgttgccagacctgttgccactactgttgccaactctgttgccatgcctgttgccagtactgttgccaggcgcgccatgcttcatcagactct

SEQ ID NO: 3697 - DNA, 164 bp, Artificial Sequence; identical to SEQ ID NO: 3696
  Synthetic polynucleotide

SEQ ID NO: 3698 - DNA, 164 bp, Artificial Sequence
  Synthetic polynucleotide
atcatctcaccttgcctcctggtatttctacgctggatcctgcaggcgtgccaagagacgtgccaagtcgcgtgccaaggaccgtgccaagctacgtgccaagactcgtgccaagtgccgtgccaaggtacgtgccaagggcgcgccatgcttcatcagactct

SEQ ID NO: 3699 - DNA, 164 bp, Artificial Sequence; identical to SEQ ID NO: 3698
  Synthetic polynucleotide

SEQ ID NO: 3700 - DNA, 180 bp, Artificial Sequence
  Synthetic polynucleotide
atcatctcaccttgcctcctggcgtcactatcaatgggcctgcagggccagctgcggagagccagctgcggtcggccagctgcgggacgccagctgcggctagccagctgcggactgccagctgcggtgcgccagctgcgggtagccagctgcggggcgcgccatgcttcatcagactct

SEQ ID NO: 3701 - DNA, 180 bp, Artificial Sequence; identical to SEQ ID NO: 3700
  Synthetic polynucleotide

SEQ ID NO: 3702 - DNA, 172 bp, Artificial Sequence
  Synthetic polynucleotide
atcatctcaccttgcctcctggtaagctacttacgttacctgcagggtgacgtcatagagtgacgtcattcggtgacgtcatgacgtgacgtcatctagtgacgtcatactgtgacgtcattgcgtgacgtcatgtagtgacgtcatggcgcgccatgcttcatcagactct

SEQ ID NO: 3703 - DNA, 172 bp, Artificial Sequence; identical to SEQ ID NO: 3702
  Synthetic polynucleotide

SEQ ID NO: 3704 - DNA, 197 bp, Artificial Sequence
  Synthetic polynucleotide
atcatctcaccttgcctcctgactcaagcacgtccgcacctgcaggtgtccatggtgctgaagatgtccatggtgctgatcgtgtccatggtgctgagactgtccatggtgctgactatgtccatggtgctgaacttgtccatggtgctgatgctgtccatggtgctgagtaggcgcgccatgcttcatcagactct

SEQ ID NO: 3705 - DNA, 197 bp, Artificial Sequence; identical to SEQ ID NO: 3704
  Synthetic polynucleotide

SEQ ID NO: 3706 - DNA, 148 bp, Artificial Sequence
  Synthetic polynucleotide
atcatctcaccttgcctcctgtttgaatgcctcgtcatcctgcaggcttccggagacttccggtcgcttccgggaccttccggctacttccggactcttccggtgccttccgggtacttccggggcgcgccatgcttcatcagactct

SEQ ID NO: 3707 - DNA, 148 bp, Artificial Sequence; identical to SEQ ID NO: 3706
  Synthetic polynucleotide

SEQ ID NO: 3708 - DNA, 156 bp, Artificial Sequence
  Synthetic polynucleotide
atcatctcaccttgcctcctgtgagtatgcacatgcatcctgcaggaaggggcgagaaaggggcgtcgaaggggcggacaaggggcgctaaaggggcgactaaggggcgtgcaaggggcggtaaaggggcgggcgcgccatgcttcatcagactct

SEQ ID NO: 3709 - DNA, 156 bp, Artificial Sequence; identical to SEQ ID NO: 3708
  Synthetic polynucleotide

SEQ ID NO: 3710 - DNA, 190 bp, Artificial Sequence
  Synthetic polynucleotide
atcatctcaccttgcctcctgaggtaccatgttcgggacctgcagggattgtgcaataccagagattgtgcaatacctcggattgtgcaataccgacgattgtgcaataccctagattgtgcaataccactgattgtgcaatacctgcgattgtgcaataccgtaggcgcgccatgcttcatcagactct

SEQ ID NO: 3711 - DNA, 190 bp, Artificial Sequence; identical to SEQ ID NO: 3710
  Synthetic polynucleotide

SEQ ID NO: 3712 - DNA, 172 bp, Artificial Sequence
  Synthetic polynucleotide
atcatctcaccttgcctcctgtacagatgtgtatgcatcctgcagggccagttgagagagccagttgagtcggccagttgaggacgccagttgagctagccagttgagactgccagttgagtgcgccagttgaggtagccagttgagggcgcgccatgcttcatcagactct

SEQ ID NO: 3713 - DNA, 172 bp, Artificial Sequence; identical to SEQ ID NO: 3712
  Synthetic polynucleotide

SEQ ID NO: 3714 - DNA, 180 bp, Artificial Sequence
  Synthetic polynucleotide
atcatctcaccttgcctcctgcacgagtttcacgttgccctgcaggaggaagtgcaaagaaggaagtgcaatcgaggaagtgcaagacaggaagtgcaactaaggaagtgcaaactaggaagtgcaatgcaggaagtgcaagtaaggaagtgcaaggcgcgccatgcttcatcagactct

SEQ ID NO: 3715 - DNA, 180 bp, Artificial Sequence; identical to SEQ ID NO: 3714
  Synthetic polynucleotide

SEQ ID NO: 3716 - DNA, 172 bp, Artificial Sequence
  Synthetic polynucleotide
atcatctcaccttgcctcctgataactgccgacgctcacctgcagggtgacgtcagagagtgacgtcagtcggtgacgtcaggacgtgacgtcagctagtgacgtcagactgtgacgtcagtgcgtgacgtcaggtagtgacgtcagggcgcgccatgcttcatcagactct

SEQ ID NO: 3717 - DNA, 172 bp, Artificial Sequence; identical to SEQ ID NO: 3716
  Synthetic polynucleotide

SEQ ID NO: 3718 - DNA, 172 bp, Artificial Sequence
  Synthetic polynucleotide
atcatctcaccttgcctcctgccgaaacggagttcaaacctgcaggtgagtaaacaagatgagtaaacatcgtgagtaaacagactgagtaaacactatgagtaaacaacttgagtaaacatgctgagtaaacagtatgagtaaacaggcgcgccatgcttcatcagactct

SEQ ID NO: 3719 - DNA, 172 bp, Artificial Sequence; identical to SEQ ID NO: 3718
  Synthetic polynucleotide

SEQ ID NO: 3720 - DNA, 188 bp, Artificial Sequence
  Synthetic polynucleotide
atcatctcaccttgcctcctgtttcagacgtgttctctcctgcaggagtgggcgtggcagaagtgggcgtggctcgagtgggcgtggcgacagtgggcgtggcctaagtgggcgtggcactagtgggcgtggctgcagtgggcgtggcgtaagtgggcgtggcggcgcgccatgcttcatcagactct

SEQ ID NO: 3721 - DNA, 188 bp, Artificial Sequence; identical to SEQ ID NO: 3720
  Synthetic polynucleotide

SEQ ID NO: 3722 - DNA, 180 bp, Artificial Sequence
  Synthetic polynucleotide
atcatctcaccttgcctcctgatcagtagaaacccacccctgcaggtatgaccttgaagatatgaccttgatcgtatgaccttgagactatgaccttgactatatgaccttgaacttatgaccttgatgctatgaccttgagtatatgaccttgaggcgcgccatgcttcatcagactct

SEQ ID NO: 3723 - DNA, 180 bp, Artificial Sequence; identical to SEQ ID NO: 3722
  Synthetic polynucleotide

SEQ ID NO: 3724 - DNA, 180 bp, Artificial Sequence
  Synthetic polynucleotide
atcatctcaccttgcctcctggttccataacggcaccacctgcaggaaggtgtgaaaagaaaggtgtgaaatcgaaggtgtgaaagacaaggtgtgaaactaaaggtgtgaaaactaaggtgtgaaatgcaaggtgtgaaagtaaaggtgtgaaaggcgcgccatgcttcatcagactct

SEQ ID NO: 3725 - DNA, 180 bp, Artificial Sequence; identical to SEQ ID NO: 3724
  Synthetic polynucleotide

SEQ ID NO: 3726 - DNA, 190 bp, Artificial Sequence
  Synthetic polynucleotide
atcatctcaccttgcctcctgccgaacgtttgtctaggcctgcagggaacccggaagtggagagaacccggaagtggtcggaacccggaagtgggacgaacccggaagtggctagaacccggaagtggactgaacccggaagtggtgcgaacccggaagtgggtaggcgcgccatgcttcatcagactct

SEQ ID NO: 3727 - DNA, 190 bp, Artificial Sequence; identical to SEQ ID NO: 3726
  Synthetic polynucleotide

SEQ ID NO: 3728 - DNA, 185 bp, Artificial Sequence
  Synthetic polynucleotide
atcatctcaccttgcctcctgtgactcgcgttagatgacctgcaggtaaagtcgtaaaacgtagataaagtcgtaaaacgttcgtaaagtcgtaaaacgtgactaaagtcgtaaaacgtctataaagtcgtaaaacgtacttaaagtcgtaaaacgttgcggcgcgccatgcttcatcagactct

SEQ ID NO: 3729 - DNA, 185 bp, Artificial Sequence; identical to SEQ ID NO: 3728
  Synthetic polynucleotide

SEQ ID NO: 3730 - DNA, 172 bp, Artificial Sequence
  Synthetic polynucleotide
atcatctcaccttgcctcctgcataaagcatgattacgcctgcaggctgttctttcagactgttctttctcgctgttctttcgacctgttctttcctactgttctttcactctgttctttctgcctgttctttcgtactgttctttcggcgcgccatgcttcatcagactct

SEQ ID NO: 3731 - DNA, 172 bp, Artificial Sequence; identical to SEQ ID NO: 3730
  Synthetic polynucleotide

SEQ ID NO: 3732 - DNA, 188 bp, Artificial Sequence
  Synthetic polynucleotide
atcatctcaccttgcctcctgcgctaagccgcatagcacctgcaggtttcgcgccaaaagatttcgcgccaaatcgtttcgcgccaaagactttcgcgccaaactatttcgcgccaaaacttttcgcgccaaatgctttcgcgccaaagtatttcgcgccaaaggcgcgccatgcttcatcagactct

SEQ ID NO: 3733 - DNA, 188 bp, Artificial Sequence; identical to SEQ ID NO: 3732
  Synthetic polynucleotide

SEQ ID NO: 3734 - DNA, 197 bp, Artificial Sequence
  Synthetic polynucleotide
atcatctcaccttgcctcctgcaacagcagggtggtgtcctgcaggggtacagggtgttctagaggtacagggtgttcttcgggtacagggtgttctgacggtacagggtgttctctaggtacagggtgttctactggtacagggtgttcttgcggtacagggtgttctgtaggcgcgccatgcttcatcagactct

SEQ ID NO: 3735 - DNA, 197 bp, Artificial Sequence; identical to SEQ ID NO: 3734
  Synthetic polynucleotide

SEQ ID NO: 3736 - DNA, 197 bp, Artificial Sequence
  Synthetic polynucleotide
atcatctcaccttgcctcctgtggcagcgtctattatacctgcaggaaaaatggcgccaaaatgagaaaaaatggcgccaaaatgtcgaaaaatggcgccaaaatggacaaaaatggcgccaaaatgctaaaaaatggcgccaaaatgactaaaaatggcgccaaaatgtgcggcgcgccatgcttcatcagactct

SEQ ID NO: 3737 - DNA, 197 bp, Artificial Sequence; identical to SEQ ID NO: 3736
  Synthetic polynucleotide

SEQ ID NO: 3738 - DNA, 156 bp, Artificial Sequence
  Synthetic polynucleotide
atcatctcaccttgcctcctgtaaactccatcctgtcgcctgcagggtacgtaaagagtacgtaatcggtacgtaagacgtacgtaactagtacgtaaactgtacgtaatgcgtacgtaagtagtacgtaaggcgcgccatgcttcatcagactct

SEQ ID NO: 3739 - DNA, 156 bp, Artificial Sequence; identical to SEQ ID NO: 3738
  Synthetic polynucleotide

SEQ ID NO: 3740 - DNA, 191 bp, Artificial Sequence
  Synthetic polynucleotide
atcatctcaccttgcctcctggatgagagcctacagatcctgcaggtccactaattagcggttagatccactaattagcggtttcgtccactaattagcggttgactccactaattagcggttctatccactaattagcggttacttccactaattagcggtttgcggcgcgccatgcttcatcagactct

SEQ ID NO: 3741 - DNA, 191 bp, Artificial Sequence; identical to SEQ ID NO: 3740
  Synthetic polynucleotide

SEQ ID NO: 3742 - DNA, 172 bp, Artificial Sequence
  Synthetic polynucleotide
atcatctcaccttgcctcctgctgcacaagatctaaagcctgcaggctaaaaataaagactaaaaataatcgctaaaaataagacctaaaaataactactaaaaataaactctaaaaataatgcctaaaaataagtactaaaaataaggcgcgccatgcttcatcagactct

SEQ ID NO: 3743 - DNA, 172 bp, Artificial Sequence; identical to SEQ ID NO: 3742
  Synthetic polynucleotide

SEQ ID NO: 3744 - DNA, 172 bp, Artificial Sequence
  Synthetic polynucleotide
atcatctcaccttgcctcctgtctgagatacccattaacctgcaggaacagctgatagaaacagctgattcgaacagctgatgacaacagctgatctaaacagctgatactaacagctgattgcaacagctgatgtaaacagctgatggcgcgccatgcttcatcagactct

SEQ ID NO: 3745 - DNA, 172 bp, Artificial Sequence; identical to SEQ ID NO: 3744
  Synthetic polynucleotide

SEQ ID NO: 3746 - DNA, 180 bp, Artificial Sequence
  Synthetic polynucleotide
atcatctcaccttgcctcctggcccgtatcatgtttaacctgcaggtgtgaccttggagatgtgaccttggtcgtgtgaccttgggactgtgaccttggctatgtgaccttggacttgtgaccttggtgctgtgaccttgggtatgtgaccttggggcgcgccatgcttcatcagactct

SEQ ID NO: 3747 - DNA, 180 bp, Artificial Sequence; identical to SEQ ID NO: 3746
  Synthetic polynucleotide

SEQ ID NO: 3748 - DNA, 185 bp, Artificial Sequence
  Synthetic polynucleotide
atcatctcaccttgcctcctggacagtccgtgtcattgcctgcaggccacacccaggggttgagaccacacccaggggttgtcgccacacccaggggttggacccacacccaggggttgctaccacacccaggggttgactccacacccaggggttgtgcggcgcgccatgcttcatcagactct

SEQ ID NO: 3749 - DNA, 185 bp, Artificial Sequence; identical to SEQ ID NO: 3748
  Synthetic polynucleotide

SEQ ID NO: 3750 - DNA, 172 bp, Artificial Sequence
  Synthetic polynucleotide
atcatctcaccttgcctcctgaacgcaaagcccggaagcctgcaggttttgttttaagattttgttttatcgttttgttttagacttttgttttactattttgttttaactttttgttttatgcttttgttttagtattttgttttaggcgcgccatgcttcatcagactct

SEQ ID NO: 3751 - DNA, 172 bp, Artificial Sequence; identical to SEQ ID NO: 3750
  Synthetic polynucleotide

SEQ ID NO: 3752 - DNA, 156 bp, Artificial Sequence
  Synthetic polynucleotide
atcatctcaccttgcctcctgtgcgtcttaaccgaccacctgcaggttgcgaaaagattgcgaaatcgttgcgaaagacttgcgaaactattgcgaaaactttgcgaaatgcttgcgaaagtattgcgaaaggcgcgccatgcttcatcagactct

SEQ ID NO: 3753 - DNA, 156 bp, Artificial Sequence; identical to SEQ ID NO: 3752
  Synthetic polynucleotide

SEQ ID NO: 3754 - DNA, 172 bp, Artificial Sequence
  Synthetic polynucleotide
atcatctcaccttgcctcctggaaggctttgaaggcctcctgcaggtagagataagagatagagataagtcgtagagataaggactagagataagctatagagataagacttagagataagtgctagagataaggtatagagataagggcgcgccatgcttcatcagactct

SEQ ID NO: 3755 - DNA, 172 bp, Artificial Sequence; identical to SEQ ID NO: 3754
  Synthetic polynucleotide

SEQ ID NO: 3756 - DNA, 190 bp, Artificial Sequence
  Synthetic polynucleotide
atcatctcaccttgcctcctgaatagagactctccgtacctgcaggaacgtaaccacgtaagaaacgtaaccacgtatcgaacgtaaccacgtagacaacgtaaccacgtactaaacgtaaccacgtaactaacgtaaccacgtatgcaacgtaaccacgtagtaggcgcgccatgcttcatcagactct

SEQ ID NO: 3757 - DNA, 190 bp, Artificial Sequence; identical to SEQ ID NO: 3756
  Synthetic polynucleotide

SEQ ID NO: 3758 - DNA, 172 bp, Artificial Sequence
  Synthetic polynucleotide
atcatctcaccttgcctcctgcgtgtggtgaagtgagacctgcaggcgttgctaagagacgttgctaagtcgcgttgctaaggaccgttgctaagctacgttgctaagactcgttgctaagtgccgttgctaaggtacgttgctaagggcgcgccatgcttcatcagactct

SEQ ID NO: 3759 - DNA, 172 bp, Artificial Sequence; identical to SEQ ID NO: 3758
  Synthetic polynucleotide

SEQ ID NO: 3760 - DNA, 190 bp, Artificial Sequence
  Synthetic polynucleotide
atcatctcaccttgcctcctggatcacttggtgtaaatcctgcaggtcggctcctttgatagatcggctcctttgattcgtcggctcctttgatgactcggctcctttgatctatcggctcctttgatacttcggctcctttgattgctcggctcctttgatgtaggcgcgccatgcttcatcagactct

SEQ ID NO: 3761 - DNA, 190 bp, Artificial Sequence; identical to SEQ ID NO: 3760
  Synthetic polynucleotide

SEQ ID NO: 3762 - DNA, 164 bp, Artificial Sequence
  Synthetic polynucleotide
atcatctcaccttgcctcctgctttacttcgtctcgcccctgcaggcaaaacaatagacaaaacaattcgcaaaacaatgaccaaaacaatctacaaaacaatactcaaaacaattgccaaaacaatgtacaaaacaatggcgcgccatgcttcatcagactct

SEQ ID NO: 3763 - DNA, 164 bp, Artificial Sequence; identical to SEQ ID NO: 3762
  Synthetic polynucleotide

SEQ ID NO: 3764 - DNA, 197 bp, Artificial Sequence
  Synthetic polynucleotide
atcatctcaccttgcctcctgtcacatagggccctcgtcctgcaggccatgccctgaggctagaccatgccctgaggcttcgccatgccctgaggctgacccatgccctgaggctctaccatgccctgaggctactccatgccctgaggcttgcccatgccctgaggctgtaggcgcgccatgcttcatcagactct

SEQ ID NO: 3765 - DNA, 197 bp, Artificial Sequence; identical to SEQ ID NO: 3764
  Synthetic polynucleotide

SEQ ID NO: 3766 - DNA, 156 bp, Artificial Sequence
  Synthetic polynucleotide
atcatctcaccttgcctcctgcaaggttgttcaagtggcctgcaggacataaatagaacataaattcgacataaatgacacataaatctaacataaatactacataaattgcacataaatgtaacataaatggcgcgccatgcttcatcagactct

SEQ ID NO: 3767 - DNA, 156 bp, Artificial Sequence; identical to SEQ ID NO: 3766
  Synthetic polynucleotide

SEQ ID NO: 3768 - DNA, 172 bp, Artificial Sequence
  Synthetic polynucleotide
atcatctcaccttgcctcctgagtcgctgcgccatcatcctgcaggatgcgggtacagaatgcgggtactcgatgcgggtacgacatgcgggtacctaatgcgggtacactatgcgggtactgcatgcgggtacgtaatgcgggtacggcgcgccatgcttcatcagactct

SEQ ID NO: 3769 - DNA, 172 bp, Artificial Sequence; identical to SEQ ID NO: 3768
  Synthetic polynucleotide

SEQ ID NO: 3770 - DNA, 188 bp, Artificial Sequence
  Synthetic polynucleotide
atcatctcaccttgcctcctgtgctatcttaatttgcccctgcaggtgattgcaattaagatgattgcaattatcgtgattgcaattagactgattgcaattactatgattgcaattaacttgattgcaattatgctgattgcaattagtatgattgcaattaggcgcgccatgcttcatcagactct

SEQ ID NO: 3771 - DNA, 188 bp, Artificial Sequence; identical to SEQ ID NO: 3770
  Synthetic polynucleotide

SEQ ID NO: 3772 - DNA, 172 bp, Artificial Sequence
  Synthetic polynucleotide
atcatctcaccttgcctcctggataacagaaacaccgccctgcaggctaattatacagactaattatactcgctaattatacgacctaattatacctactaattatacactctaattatactgcctaattatacgtactaattatacggcgcgccatgcttcatcagactct

SEQ ID NO: 3773 - DNA, 172 bp, Artificial Sequence; identical to SEQ ID NO: 3772
  Synthetic polynucleotide

SEQ ID NO: 3774 - DNA, 188 bp, Artificial Sequence
  Synthetic polynucleotide
atcatctcaccttgcctcctgtgctccctgtctcagaacctgcaggttcggtggtcgcagattcggtggtcgctcgttcggtggtcgcgacttcggtggtcgcctattcggtggtcgcactttcggtggtcgctgcttcggtggtcgcgtattcggtggtcgcggcgcgccatgcttcatcagactct

SEQ ID NO: 3775 - DNA, 188 bp, Artificial Sequence; identical to SEQ ID NO: 3774
  Synthetic polynucleotide

SEQ ID NO: 3776 - DNA, 186 bp, Artificial Sequence
  Synthetic polynucleotide
atcatctcaccttgcctcctgcaaagtgtcggtactaccctgcaggaggtgtgaaatttcacacctagaaggtgtgaaatttcacaccttcgaggtgtgaaatttcacacctgacaggtgtgaaatttcacacctctaaggtgtgaaatttcacacctactggcgcgccatgcttcatcagactct

SEQ ID NO: 3777 - DNA, 186 bp, Artificial Sequence; identical to SEQ ID NO: 3776
  Synthetic polynucleotide

SEQ ID NO: 3778 - DNA, 164 bp, Artificial Sequence
  Synthetic polynucleotide
atcatctcaccttgcctcctgagcgatattgtcacttccctgcagggtcacgtgaagagtcacgtgatcggtcacgtgagacgtcacgtgactagtcacgtgaactgtcacgtgatgcgtcacgtgagtagtcacgtgaggcgcgccatgcttcatcagactct

SEQ ID NO: 3779 - DNA, 164 bp, Artificial Sequence; identical to SEQ ID NO: 3778
  Synthetic polynucleotide

SEQ ID NO: 3780 - DNA, 180 bp, Artificial Sequence
  Synthetic polynucleotide
atcatctcaccttgcctcctgattaccagaaaccacgacctgcaggactaattaattagaactaattaatttcgactaattaattgacactaattaattctaactaattaattactactaattaatttgcactaattaattgtaactaattaattggcgcgccatgcttcatcagactct

SEQ ID NO: 3781 - DNA, 180 bp, Artificial Sequence; identical to SEQ ID NO: 3780
  Synthetic polynucleotide

SEQ ID NO: 3782 - DNA, 156 bp, Artificial Sequence
  Synthetic polynucleotide
atcatctcaccttgcctcctgtgtaccatagatgaactcctgcaggaagtgcgaagaaagtgcgatcgaagtgcgagacaagtgcgactaaagtgcgaactaagtgcgatgcaagtgcgagtaaagtgcgaggcgcgccatgcttcatcagactct

SEQ ID NO: 3783 - DNA, 156 bp, Artificial Sequence; identical to SEQ ID NO: 3782
  Synthetic polynucleotide

SEQ ID NO: 3784 - DNA, 197 bp, Artificial Sequence
  Synthetic polynucleotide
atcatctcaccttgcctcctgtcactacagatgggagtcctgcaggtgacctctggtgacctttagatgacctctggtgaccttttcgtgacctctggtgacctttgactgacctctggtgacctttctatgacctctggtgacctttacttgacctctggtgaccttttgcggcgcgccatgcttcatcagactct

SEQ ID NO: 3785 - DNA, 197 bp, Artificial Sequence; identical to SEQ ID NO: 3784
  Synthetic polynucleotide

SEQ ID NO: 3786 - DNA, 190 bp, Artificial Sequence
  Synthetic polynucleotide
atcatctcaccttgcctcctgtcttctcggatggagaacctgcaggtttgattcgatcatagatttgattcgatcattcgtttgattcgatcatgactttgattcgatcatctatttgattcgatcatacttttgattcgatcattgctttgattcgatcatgtaggcgcgccatgcttcatcagactct

SEQ ID NO: 3787 - DNA, 190 bp, Artificial Sequence; identical to SEQ ID NO: 3786
  Synthetic polynucleotide

SEQ ID NO: 3788 - DNA, 200 bp, Artificial Sequence
  Synthetic polynucleotide
atcatctcaccttgcctcctgccttataccaaggcttgcctgcaggagtttcacttcctctttttagaagtttcacttcctcttttttcgagtttcacttcctctttttgacagtttcacttcctctttttctaagtttcacttcctctttttactagtttcacttcctctttttggcgcgccatgcttcatcagactct

SEQ ID NO: 3789 - DNA, 200 bp, Artificial Sequence; identical to SEQ ID NO: 3788
  Synthetic polynucleotide

SEQ ID NO: 3790 - DNA, 185 bp, Artificial Sequence
  Synthetic polynucleotide
atcatctcaccttgcctcctgtactgttaccctaccagcctgcaggctgaacagatggtcggagactgaacagatggtcggtcgctgaacagatggtcgggacctgaacagatggtcggctactgaacagatggtcggactctgaacagatggtcggtgcggcgcgccatgcttcatcagactct

SEQ ID NO: 3791 - DNA, 185 bp, Artificial Sequence; identical to SEQ ID NO: 3790
  Synthetic polynucleotide

SEQ ID NO: 3792 - DNA, 186 bp, Artificial Sequence
  Synthetic polynucleotide
atcatctcaccttgcctcctggagaccacgagtcagcacctgcaggtcatctttgtttacttttaaagatcatctttgtttacttttaatcgtcatctttgtttacttttaagactcatctttgtttacttttaactatcatctttgtttacttttaaactggcgcgccatgcttcatcagactct

SEQ ID NO: 3793 - DNA, 186 bp, Artificial Sequence; identical to SEQ ID NO: 3792
  Synthetic polynucleotide

SEQ ID NO: 3794 - DNA, 197 bp, Artificial Sequence
  Synthetic polynucleotide
atcatctcaccttgcctcctggttccgctagtgtgagccctgcagggtgaccttataaggtcacagagtgaccttataaggtcactcggtgaccttataaggtcacgacgtgaccttataaggtcacctagtgaccttataaggtcacactgtgaccttataaggtcactgcggcgcgccatgcttcatcagactct

SEQ ID NO: 3795 - DNA, 197 bp, Artificial Sequence; identical to SEQ ID NO: 3794
  Synthetic polynucleotide

SEQ ID NO: 3796 - DNA, 156 bp, Artificial Sequence
  Synthetic polynucleotide
atcatctcaccttgcctcctgatttccctcgtctgtagcctgcaggcctgctgaagacctgctgatcgcctgctgagaccctgctgactacctgctgaactcctgctgatgccctgctgagtacctgctgaggcgcgccatgcttcatcagactct

SEQ ID NO: 3797 - DNA, 156 bp, Artificial Sequence; identical to SEQ ID NO: 3796
  Synthetic polynucleotide

SEQ ID NO: 3798 - DNA, 191 bp, Artificial Sequence
  Synthetic polynucleotide
atcatctcaccttgcctcctgcaaatgacatcgccagtcctgcaggttatctattgttctttaagattatctattgttctttatcgttatctattgttctttagacttatctattgttctttactattatctattgttctttaactttatctattgttctttatgcggcgcgccatgcttcatcagactct

SEQ ID NO: 3799 - DNA, 191 bp, Artificial Sequence; identical to SEQ ID NO: 3798
  Synthetic polynucleotide

SEQ ID NO: 3800 - DNA, 156 bp, Artificial Sequence
  Synthetic polynucleotide
atcatctcaccttgcctcctgtttaccgatacgtcacacctgcaggaccccggaagaaccccggatcgaccccggagacaccccggactaaccccggaactaccccggatgcaccccggagtaaccccggaggcgcgccatgcttcatcagactct

SEQ ID NO: 3801 - DNA, 156 bp, Artificial Sequence; identical to SEQ ID NO: 3800
  Synthetic polynucleotide

SEQ ID NO: 3802 - DNA, 148 bp, Artificial Sequence
  Synthetic polynucleotide
atcatctcaccttgcctcctgacttacccggaccatgtcctgcaggtttaattagatttaatttcgtttaattgactttaattctatttaattacttttaatttgctttaattgtatttaattggcgcgccatgcttcatcagactct

SEQ ID NO: 3803 - DNA, 148 bp, Artificial Sequence; identical to SEQ ID NO: 3802
  Synthetic polynucleotide

SEQ ID NO: 3804 - DNA, 190 bp, Artificial Sequence
  Synthetic polynucleotide
atcatctcaccttgcctcctgaggacacttaggtgcggcctgcaggaattacttcctgtcagaaattacttcctgtctcgaattacttcctgtcgacaattacttcctgtcctaaattacttcctgtcactaattacttcctgtctgcaattacttcctgtcgtaggcgcgccatgcttcatcagactct

SEQ ID NO: 3805 - DNA, 190 bp, Artificial Sequence; identical to SEQ ID NO: 3804
  Synthetic polynucleotide

SEQ ID NO: 3806 - DNA, 172 bp, Artificial Sequence
  Synthetic polynucleotide
atcatctcaccttgcctcctggtgggacgttcccttagcctgcaggggaaatccccagaggaaatcccctcgggaaatccccgacggaaatccccctaggaaatccccactggaaatcccctgcggaaatccccgtaggaaatccccggcgcgccatgcttcatcagactct

SEQ ID NO: 3807 - DNA, 172 bp, Artificial Sequence; identical to SEQ ID NO: 3806
  Synthetic polynucleotide

SEQ ID NO: 3808 - DNA, 188 bp, Artificial Sequence
  Synthetic polynucleotide
atcatctcaccttgcctcctgaacagtccgaggaccatcctgcaggttctagaaagacagattctagaaagactcgttctagaaagacgacttctagaaagacctattctagaaagacactttctagaaagactgcttctagaaagacgtattctagaaagacggcgcgccatgcttcatcagactct

SEQ ID NO: 3809 - DNA, 188 bp, Artificial Sequence; identical to SEQ ID NO: 3808
  Synthetic polynucleotide

SEQ ID NO: 3810 - DNA, 200 bp, Artificial Sequence
  Synthetic polynucleotide
atcatctcaccttgcctcctgctgcatgtgaaggatagcctgcagggtcacgcttggctgcccccagagtcacgcttggctgccccctcggtcacgcttggctgcccccgacgtcacgcttggctgcccccctagtcacgcttggctgcccccactgtcacgcttggctgcccccggcgcgccatgcttcatcagactct

SEQ ID NO: 3811 - DNA, 200 bp, Artificial Sequence; identical to SEQ ID NO: 3810
  Synthetic polynucleotide

SEQ ID NO: 3812 - DNA, 180 bp, Artificial Sequence
  Synthetic polynucleotide
atcatctcaccttgcctcctgagtagcgctttgccgtgcctgcagggaggcggggggagagaggcggggggtcggaggcgggggggacgaggcggggggctagaggcggggggactgaggcggggggtgcgaggcgggggggtagaggcggggggggcgcgccatgcttcatcagactct

SEQ ID NO: 3813 - DNA, 180 bp, Artificial Sequence; identical to SEQ ID NO: 3812
  Synthetic polynucleotide

SEQ ID NO: 3814 - DNA, 190 bp, Artificial Sequence
  Synthetic polynucleotide
atcatctcaccttgcctcctgacctcctgcgatcaagccctgcaggagtaaatattttttagaagtaaatatttttttcgagtaaatattttttgacagtaaatattttttctaagtaaatattttttactagtaaatatttttttgcagtaaatattttttgtaggcgcgccatgcttcatcagactct

SEQ ID NO: 3815 - DNA, 190 bp, Artificial Sequence; identical to SEQ ID NO: 3814
  Synthetic polynucleotide

SEQ ID NO: 3816 - DNA, 172 bp, Artificial Sequence
  Synthetic polynucleotide
atcatctcaccttgcctcctgcacgaggtaacatcgctcctgcaggcctaatccgcagacctaatccgctcgcctaatccgcgaccctaatccgcctacctaatccgcactcctaatccgctgccctaatccgcgtacctaatccgcggcgcgccatgcttcatcagactct

SEQ ID NO: 3817 - DNA, 172 bp, Artificial Sequence; identical to SEQ ID NO: 3816
  Synthetic polynucleotide

SEQ ID NO: 3818 - DNA, 156 bp, Artificial Sequence
  Synthetic polynucleotide
atcatctcaccttgcctcctgacaagtgaaggcccttccctgcagggtacgtcaagagtacgtcatcggtacgtcagacgtacgtcactagtacgtcaactgtacgtcatgcgtacgtcagtagtacgtcaggcgcgccatgcttcatcagactct

SEQ ID NO: 3819 - DNA, 156 bp, Artificial Sequence; identical to SEQ ID NO: 3818
  Synthetic polynucleotide

SEQ ID NO: 3820 - DNA, 180 bp, Artificial Sequence
  Synthetic polynucleotide
atcatctcaccttgcctcctgctgttggtctgctaaatcctgcagggaggtcagggcagagaggtcagggctcggaggtcagggcgacgaggtcagggcctagaggtcagggcactgaggtcagggctgcgaggtcagggcgtagaggtcagggcggcgcgccatgcttcatcagactct

SEQ ID NO: 3821 - DNA, 180 bp, Artificial Sequence; identical to SEQ ID NO: 3820
  Synthetic polynucleotide

SEQ ID NO: 3822 - DNA, 188 bp, Artificial Sequence
  Synthetic polynucleotide
atcatctcaccttgcctcctgatcatcatcttccagatcctgcaggttgcatattcatagattgcatattcattcgttgcatattcatgacttgcatattcatctattgcatattcatactttgcatattcattgcttgcatattcatgtattgcatattcatggcgcgccatgcttcatcagactct

SEQ ID NO: 3823 - DNA, 188 bp, Artificial Sequence; identical to SEQ ID NO: 3822
  Synthetic polynucleotide

SEQ ID NO: 3824 - DNA, 191 bp, Artificial Sequence
  Synthetic polynucleotide
atcatctcaccttgcctcctgcgacagaaagtggtccccctgcaggtactaagtacttaaatgagatactaagtacttaaatgtcgtactaagtacttaaatggactactaagtacttaaatgctatactaagtacttaaatgacttactaagtacttaaatgtgcggcgcgccatgcttcatcagactct

SEQ ID NO: 3825 - DNA, 191 bp, Artificial Sequence; identical to SEQ ID NO: 3824
  Synthetic polynucleotide

SEQ ID NO: 3826 - DNA, 191 bp, Artificial Sequence
  Synthetic polynucleotide
atcatctcaccttgcctcctgtagaagatccactggtgcctgcaggaatagggtatcatatatagaaatagggtatcatatattcgaatagggtatcatatatgacaatagggtatcatatatctaaatagggtatcatatatactaatagggtatcatatattgcggcgcgccatgcttcatcagactct

SEQ ID NO: 3827 - DNA, 191 bp, Artificial Sequence; identical to SEQ ID NO: 3826
  Synthetic polynucleotide

SEQ ID NO: 3828 - DNA, 191 bp, Artificial Sequence
  Synthetic polynucleotide
atcatctcaccttgcctcctgatctcggcctatagcggcctgcaggacccctaattagcggtgagaacccctaattagcggtgtcgacccctaattagcggtggacacccctaattagcggtgctaacccctaattagcggtgactacccctaattagcggtgtgcggcgcgccatgcttcatcagactct

SEQ ID NO: 3829 - DNA, 191 bp, Artificial Sequence; identical to SEQ ID NO: 3828
  Synthetic polynucleotide

SEQ ID NO: 3830 - DNA, 190 bp, Artificial Sequence
  Synthetic polynucleotide
atcatctcaccttgcctcctgaatcgtcaccctgtaaccctgcaggagttaatatttactagaagttaatatttacttcgagttaatatttactgacagttaatatttactctaagttaatatttactactagttaatatttacttgcagttaatatttactgtaggcgcgccatgcttcatcagactct

SEQ ID NO: 3831 - DNA, 190 bp, Artificial Sequence; identical to SEQ ID NO: 3830
  Synthetic polynucleotide

SEQ ID NO: 3832 - DNA, 188 bp, Artificial Sequence
  Synthetic polynucleotide
atcatctcaccttgcctcctgtccatccactcctataccctgcagggggtcatgacccagagggtcatgaccctcggggtcatgacccgacgggtcatgacccctagggtcatgacccactgggtcatgaccctgcgggtcatgacccgtagggtcatgacccggcgcgccatgcttcatcagactct

SEQ ID NO: 3833 - DNA, 188 bp, Artificial Sequence; identical to SEQ ID NO: 3832
  Synthetic polynucleotide

SEQ ID NO: 3834 - DNA, 172 bp, Artificial Sequence
  Synthetic polynucleotide
atcatctcaccttgcctcctgaatgagacgttcggatacctgcaggcccgccccccagacccgcccccctcgcccgccccccgaccccgccccccctacccgccccccactcccgcccccctgccccgccccccgtacccgccccccggcgcgccatgcttcatcagactct

SEQ ID NO: 3835 - DNA, 172 bp, Artificial Sequence; identical to SEQ ID NO: 3834
  Synthetic polynucleotide

SEQ ID NO: 3836 - DNA, 200 bp, Artificial Sequence
  Synthetic polynucleotide
atcatctcaccttgcctcctgtactcgctcaaggtcctcctgcagggagggcttaatggcttcgtagagagggcttaatggcttcgttcggagggcttaatggcttcgtgacgagggcttaatggcttcgtctagagggcttaatggcttcgtactgagggcttaatggcttcgtggcgcgccatgcttcatcagactct

SEQ ID NO: 3837 - DNA, 200 bp, Artificial Sequence; identical to SEQ ID NO: 3836
  Synthetic polynucleotide

SEQ ID NO: 3838 - DNA, 190 bp, Artificial Sequence
  Synthetic polynucleotide
atcatctcaccttgcctcctgaatcggaagagcaccatcctgcaggaatgtaaacaacacagaaatgtaaacaacactcgaatgtaaacaacacgacaatgtaaacaacacctaaatgtaaacaacacactaatgtaaacaacactgcaatgtaaacaacacgtaggcgcgccatgcttcatcagactct

SEQ ID NO: 3839 - DNA, 190 bp, Artificial Sequence; identical to SEQ ID NO: 3838
  Synthetic polynucleotide

SEQ ID NO: 3840 - DNA, 190 bp, Artificial Sequence
  Synthetic polynucleotide
atcatctcaccttgcctcctgcagacacgatagtaccccctgcaggtaattggccaattaagataattggccaattatcgtaattggccaattagactaattggccaattactataattggccaattaacttaattggccaattatgctaattggccaattagtaggcgcgccatgcttcatcagactct

SEQ ID NO: 3841 - DNA, 190 bp, Artificial Sequence; identical to SEQ ID NO: 3840
  Synthetic polynucleotide

SEQ ID NO: 3842 - DNA, 197 bp, Artificial Sequence
  Synthetic polynucleotide
atcatctcaccttgcctcctgaaagtgtttggtggccgcctgcagggagacaggaagtgggagagagacaggaagtgggtcggagacaggaagtggggacgagacaggaagtgggctagagacaggaagtgggactgagacaggaagtgggtgcgagacaggaagtggggtaggcgcgccatgcttcatcagactct

SEQ ID NO: 3843 - DNA, 197 bp, Artificial Sequence; identical to SEQ ID NO: 3842
  Synthetic polynucleotide

SEQ ID NO: 3844 - DNA, 191 bp, Artificial Sequence
  Synthetic polynucleotide
atcatctcaccttgcctcctgagacagtcatccatacccctgcaggaggattttacgaccttaagaaggattttacgaccttatcgaggattttacgaccttagacaggattttacgaccttactaaggattttacgaccttaactaggattttacgaccttatgcggcgcgccatgcttcatcagactct

SEQ ID NO: 3845 - DNA, 191 bp, Artificial Sequence; identical to SEQ ID NO: 3844
  Synthetic polynucleotide

SEQ ID NO: 3846 - DNA, 188 bp, Artificial Sequence
  Synthetic polynucleotide
atcatctcaccttgcctcctgtttgataaagacccagacctgcaggcgccggcgggcgagacgccggcgggcgtcgcgccggcgggcggaccgccggcgggcgctacgccggcgggcgactcgccggcgggcgtgccgccggcgggcggtacgccggcgggcgggcgcgccatgcttcatcagactct

SEQ ID NO: 3847 - DNA, 188 bp, Artificial Sequence; identical to SEQ ID NO: 3846
  Synthetic polynucleotide

SEQ ID NO: 3848 - DNA, 185 bp, Artificial Sequence
  Synthetic polynucleotide
atcatctcaccttgcctcctgagacactgtgcagacctcctgcaggataattaatgacctccagaataattaatgacctcctcgataattaatgacctccgacataattaatgacctccctaataattaatgacctccactataattaatgacctcctgcggcgcgccatgcttcatcagactct

SEQ ID NO: 3849 - DNA, 185 bp, Artificial Sequence; identical to SEQ ID NO: 3848
  Synthetic polynucleotide

SEQ ID NO: 3850 - DNA, 148 bp, Artificial Sequence
  Synthetic polynucleotide
atcatctcaccttgcctcctgtcccaagcaatcggtgacctgcaggagataagagaagataagtcgagataaggacagataagctaagataagactagataagtgcagataaggtaagataagggcgcgccatgcttcatcagactct

SEQ ID NO: 3851 - DNA, 148 bp, Artificial Sequence; identical to SEQ ID NO: 3850
  Synthetic polynucleotide

SEQ ID NO: 3852 - DNA, 186 bp, Artificial Sequence
  Synthetic polynucleotide
atcatctcaccttgcctcctgtgttagtgcgatggtgccctgcagggggggggggcggggccggggagagggggggggcggggccggggtcggggggggggcggggccgggggacgggggggggcggggccggggctagggggggggcggggccggggactggcgcgccatgcttcatcagactct

SEQ ID NO: 3853 - DNA, 186 bp, Artificial Sequence; identical to SEQ ID NO: 3852
  Synthetic polynucleotide

SEQ ID NO: 3854 - DNA, 172 bp, Artificial Sequence
  Synthetic polynucleotide
atcatctcaccttgcctcctgactagtccttcacttgccctgcaggatcacgtggtagaatcacgtggttcgatcacgtggtgacatcacgtggtctaatcacgtggtactatcacgtggttgcatcacgtggtgtaatcacgtggtggcgcgccatgcttcatcagactct

SEQ ID NO: 3855 - DNA, 172 bp, Artificial Sequence; identical to SEQ ID NO: 3854
  Synthetic polynucleotide

SEQ ID NO: 3856 - DNA, 172 bp, Artificial Sequence
  Synthetic polynucleotide
atcatctcaccttgcctcctggcaccatcgtagctttgcctgcaggaatgacactaagaaatgacactatcgaatgacactagacaatgacactactaaatgacactaactaatgacactatgcaatgacactagtaaatgacactaggcgcgccatgcttcatcagactct

SEQ ID NO: 3857 - DNA, 172 bp, Artificial Sequence; identical to SEQ ID NO: 3856
  Synthetic polynucleotide

SEQ ID NO: 3858 - DNA, 188 bp, Artificial Sequence
  Synthetic polynucleotide
atcatctcaccttgcctcctgtcaagacccaaggacaacctgcaggatcaaccgatagagaatcaaccgatagtcgatcaaccgataggacatcaaccgatagctaatcaaccgatagactatcaaccgatagtgcatcaaccgataggtaatcaaccgatagggcgcgccatgcttcatcagactct

SEQ ID NO: 3859 - DNA, 188 bp, Artificial Sequence; identical to SEQ ID NO: 3858
  Synthetic polynucleotide

SEQ ID NO: 3860 - DNA, 156 bp, Artificial Sequence
  Synthetic polynucleotide
atcatctcaccttgcctcctggaaacatggacgtacatcctgcaggttaataaaagattaataaatcgttaataaagacttaataaactattaataaaactttaataaatgcttaataaagtattaataaaggcgcgccatgcttcatcagactct

SEQ ID NO: 3861 - DNA, 156 bp, Artificial Sequence; identical to SEQ ID NO: 3860
  Synthetic polynucleotide

SEQ ID NO: 3862 - DNA, 188 bp, Artificial Sequence
  Synthetic polynucleotide
atcatctcaccttgcctcctggttatgctcgacactgacctgcaggtttgacacctttagatttgacaccttttcgtttgacacctttgactttgacacctttctatttgacacctttacttttgacaccttttgctttgacacctttgtatttgacacctttggcgcgccatgcttcatcagactct

SEQ ID NO: 3863 - DNA, 188 bp, Artificial Sequence; identical to SEQ ID NO: 3862
  Synthetic polynucleotide

SEQ ID NO: 3864 - DNA, 188 bp, Artificial Sequence
  Synthetic polynucleotide
atcatctcaccttgcctcctgcgttactggtgttccaacctgcagggccacgcccattagagccacgcccatttcggccacgcccattgacgccacgcccattctagccacgcccattactgccacgcccatttgcgccacgcccattgtagccacgcccattggcgcgccatgcttcatcagactct

SEQ ID NO: 3865 - DNA, 188 bp, Artificial Sequence; identical to SEQ ID NO: 3864
  Synthetic polynucleotide

SEQ ID NO: 3866 - DNA, 200 bp, Artificial Sequence
  Synthetic polynucleotide
atcatctcaccttgcctcctgccgcctcatccgttacacctgcaggggaaaagaacaatgggttcagaggaaaagaacaatgggttctcgggaaaagaacaatgggttcgacggaaaagaacaatgggttcctaggaaaagaacaatgggttcactggaaaagaacaatgggttcggcgcgccatgcttcatcagactct

SEQ ID NO: 3867 - DNA, 200 bp, Artificial Sequence; identical to SEQ ID NO: 3866
  Synthetic polynucleotide

SEQ ID NO: 3868 - DNA, 172 bp, Artificial Sequence
  Synthetic polynucleotide
atcatctcaccttgcctcctgcgatgtattctatcaaccctgcaggcccgccccctagacccgcccccttcgcccgccccctgaccccgccccctctacccgccccctactcccgcccccttgccccgccccctgtacccgccccctggcgcgccatgcttcatcagactct

SEQ ID NO: 3869 - DNA, 172 bp, Artificial Sequence; identical to SEQ ID NO: 3868
  Synthetic polynucleotide

SEQ ID NO: 3870 - DNA, 191 bp, Artificial Sequence
  Synthetic polynucleotide
atcatctcaccttgcctcctgaacatagggatggagagcctgcagggaacaatgttattgttcagagaacaatgttattgttctcggaacaatgttattgttcgacgaacaatgttattgttcctagaacaatgttattgttcactgaacaatgttattgttctgcggcgcgccatgcttcatcagactct

SEQ ID NO: 3871 - DNA, 191 bp, Artificial Sequence; identical to SEQ ID NO: 3870
  Synthetic polynucleotide

SEQ ID NO: 3872 - DNA, 188 bp, Artificial Sequence
  Synthetic polynucleotide
atcatctcaccttgcctcctgacttcattatccgaggacctgcagggtctgagtcatgagagtctgagtcatgtcggtctgagtcatggacgtctgagtcatgctagtctgagtcatgactgtctgagtcatgtgcgtctgagtcatggtagtctgagtcatgggcgcgccatgcttcatcagactct

SEQ ID NO: 3873 - DNA, 188 bp, Artificial Sequence; identical to SEQ ID NO: 3872
  Synthetic polynucleotide

SEQ ID NO: 3874 - DNA, 164 bp, Artificial Sequence
  Synthetic polynucleotide
atcatctcaccttgcctcctgagatctcaatgtggacgcctgcagggtcacgtgcagagtcacgtgctcggtcacgtgcgacgtcacgtgcctagtcacgtgcactgtcacgtgctgcgtcacgtgcgtagtcacgtgcggcgcgccatgcttcatcagactct

SEQ ID NO: 3875 - DNA, 164 bp, Artificial Sequence; identical to SEQ ID NO: 3874
  Synthetic polynucleotide

SEQ ID NO: 3876 - DNA, 172 bp, Artificial Sequence
  Synthetic polynucleotide
atcatctcaccttgcctcctgcggcatgcaataagcgccctgcagggggggcggggagagggggcggggtcggggggcgggggacgggggcggggctagggggcggggactgggggcggggtgcgggggcgggggtagggggcggggggcgcgccatgcttcatcagactct

SEQ ID NO: 3877 - DNA, 172 bp, Artificial Sequence; identical to SEQ ID NO: 3876
  Synthetic polynucleotide

SEQ ID NO: 3878 - DNA, 197 bp, Artificial Sequence
  Synthetic polynucleotide
atcatctcaccttgcctcctgtcttgttagcttatgtccctgcaggggcacccaagggtgcagaggcacccaagggtgctcgggcacccaagggtgcgacggcacccaagggtgcctaggcacccaagggtgcactggcacccaagggtgctgcggcacccaagggtgcgtaggcgcgccatgcttcatcagactct

SEQ ID NO: 3879 - DNA, 197 bp, Artificial Sequence; identical to SEQ ID NO: 3878
  Synthetic polynucleotide

SEQ ID NO: 3880 - DNA, 188 bp, Artificial Sequence
  Synthetic polynucleotide
atcatctcaccttgcctcctggtgatgagcatccgtcacctgcaggttgcgtgggcgtagattgcgtgggcgttcgttgcgtgggcgtgacttgcgtgggcgtctattgcgtgggcgtactttgcgtgggcgttgcttgcgtgggcgtgtattgcgtgggcgtggcgcgccatgcttcatcagactct

SEQ ID NO: 3881 - DNA, 188 bp, Artificial Sequence; identical to SEQ ID NO: 3880
  Synthetic polynucleotide

SEQ ID NO: 3882 - DNA, 164 bp, Artificial Sequence
  Synthetic polynucleotide
atcatctcaccttgcctcctgatacaacggcagcatgtcctgcagggtccttgaaagagtccttgaatcggtccttgaagacgtccttgaactagtccttgaaactgtccttgaatgcgtccttgaagtagtccttgaaggcgcgccatgcttcatcagactct

SEQ ID NO: 3883 - DNA, 164 bp, Artificial Sequence; identical to SEQ ID NO: 3882
  Synthetic polynucleotide

SEQ ID NO: 3884 - DNA, 200 bp, Artificial Sequence
  Synthetic polynucleotide
atcatctcaccttgcctcctgatgagtcatattcggtccctgcaggtttcacgcatgactgcacaagatttcacgcatgactgcacatcgtttcacgcatgactgcacagactttcacgcatgactgcacactatttcacgcatgactgcacaacttttcacgcatgactgcacaggcgcgccatgcttcatcagactct

SEQ ID NO: 3885 - DNA, 200 bp, Artificial Sequence; identical to SEQ ID NO: 3884
  Synthetic polynucleotide

SEQ ID NO: 3886 - DNA, 164 bp, Artificial Sequence
  Synthetic polynucleotide
atcatctcaccttgcctcctgaaagcattccaatccaacctgcagggagtttattagagagtttatttcggagtttattgacgagtttattctagagtttattactgagtttatttgcgagtttattgtagagtttattggcgcgccatgcttcatcagactct

SEQ ID NO: 3887 - DNA, 164 bp, Artificial Sequence; identical to SEQ ID NO: 3886
  Synthetic polynucleotide

SEQ ID NO: 3888 - DNA, 185 bp, Artificial Sequence
  Synthetic polynucleotide
atcatctcaccttgcctcctgcagaccttcgaggcgatcctgcaggttaattagctcattaaagattaattagctcattaatcgttaattagctcattaagacttaattagctcattaactattaattagctcattaaactttaattagctcattaatgcggcgcgccatgcttcatcagactct

SEQ ID NO: 3889 - DNA, 185 bp, Artificial Sequence; identical to SEQ ID NO: 3888
  Synthetic polynucleotide

SEQ ID NO: 3890 - DNA, 172 bp, Artificial Sequence
  Synthetic polynucleotide
atcatctcaccttgcctcctgactcgcgaactgttgttcctgcaggcgcacctgctagacgcacctgcttcgcgcacctgctgaccgcacctgctctacgcacctgctactcgcacctgcttgccgcacctgctgtacgcacctgctggcgcgccatgcttcatcagactct

SEQ ID NO: 3891 - DNA, 172 bp, Artificial Sequence; identical to SEQ ID NO: 3890
  Synthetic polynucleotide

SEQ ID NO: 3892 - DNA, 200 bp, Artificial Sequence
  Synthetic polynucleotide
atcatctcaccttgcctcctggggacaaacgttaacggcctgcaggttcaatatgcaaatttcggagattcaatatgcaaatttcggtcgttcaatatgcaaatttcgggacttcaatatgcaaatttcggctattcaatatgcaaatttcggactttcaatatgcaaatttcggggcgcgccatgcttcatcagactct

SEQ ID NO: 3893 - DNA, 200 bp, Artificial Sequence; identical to SEQ ID NO: 3892
  Synthetic polynucleotide

SEQ ID NO: 3894 - DNA, 197 bp, Artificial Sequence
  Synthetic polynucleotide
atcatctcaccttgcctcctgaagggctggttacatagcctgcaggaaaaagaggaagtgaagaaaaaagaggaagtgatcgaaaaagaggaagtgagacaaaaagaggaagtgactaaaaaagaggaagtgaactaaaaagaggaagtgatgcaaaaagaggaagtgagtaggcgcgccatgcttcatcagactct

SEQ ID NO: 3895 - DNA, 197 bp, Artificial Sequence; identical to SEQ ID NO: 3894
  Synthetic polynucleotide

SEQ ID NO: 3896 - DNA, 185 bp, Artificial Sequence
  Synthetic polynucleotide
atcatctcaccttgcctcctgcagaagtgcttaaacagcctgcaggagaattttattggtagagaagaattttattggtagtcgagaattttattggtaggacagaattttattggtagctaagaattttattggtagactagaattttattggtagtgcggcgcgccatgcttcatcagactct

SEQ ID NO: 3897 - DNA, 185 bp, Artificial Sequence; identical to SEQ ID NO: 3896
  Synthetic polynucleotide

SEQ ID NO: 3898 - DNA, 197 bp, Artificial Sequence
  Synthetic polynucleotide
atcatctcaccttgcctcctgtattcagtgaagaagcccctgcaggaaaaagaggaagtggagaaaaaagaggaagtggtcgaaaaagaggaagtgggacaaaaagaggaagtggctaaaaaagaggaagtggactaaaaagaggaagtggtgcaaaaagaggaagtgggtaggcgcgccatgcttcatcagactct

SEQ ID NO: 3899 - DNA, 197 bp, Artificial Sequence; identical to SEQ ID NO: 3898
  Synthetic polynucleotide

SEQ ID NO: 3900 - DNA, 197 bp, Artificial Sequence
  Synthetic polynucleotide
atcatctcaccttgcctcctggactgaacatagtagtccctgcaggaacactgcaattgttagaaacactgcaattgtttcgaacactgcaattgttgacaacactgcaattgttctaaacactgcaattgttactaacactgcaattgtttgcaacactgcaattgttgtaggcgcgccatgcttcatcagactct

SEQ ID NO: 3901 - DNA, 197 bp, Artificial Sequence; identical to SEQ ID NO: 3900
  Synthetic polynucleotide

SEQ ID NO: 3902 - DNA, 200 bp, Artificial Sequence
  Synthetic polynucleotide
atcatctcaccttgcctcctggttggtaagatctggaccctgcaggaacacggatatctgtggtcagaaacacggatatctgtggtctcgaacacggatatctgtggtcgacaacacggatatctgtggtcctaaacacggatatctgtggtcactaacacggatatctgtggtcggcgcgccatgcttcatcagactct

SEQ ID NO: 3903 - DNA, 200 bp, Artificial Sequence; identical to SEQ ID NO: 3902
  Synthetic polynucleotide

SEQ ID NO: 3904 - DNA, 197 bp, Artificial Sequence
  Synthetic polynucleotide
atcatctcaccttgcctcctgtactcaaagtgagcttacctgcaggcccgggtgcccggggagacccgggtgcccggggtcgcccgggtgcccgggggaccccgggtgcccggggctacccgggtgcccggggactcccgggtgcccggggtgccccgggtgcccgggggtaggcgcgccatgcttcatcagactct

SEQ ID NO: 3905 - DNA, 197 bp, Artificial Sequence; identical to SEQ ID NO: 3904
  Synthetic polynucleotide

SEQ ID NO: 3906 - DNA, 172 bp, Artificial Sequence
  Synthetic polynucleotide
atcatctcaccttgcctcctgtgaaatggcgcgataggcctgcaggattgcgtaatagaattgcgtaattcgattgcgtaatgacattgcgtaatctaattgcgtaatactattgcgtaattgcattgcgtaatgtaattgcgtaatggcgcgccatgcttcatcagactct

SEQ ID NO: 3907 - DNA, 172 bp, Artificial Sequence; identical to SEQ ID NO: 3906
  Synthetic polynucleotide

SEQ ID NO: 3908 - DNA, 132 bp, Artificial Sequence
  Synthetic polynucleotide
atcatctcaccttgcctcctgtctaggccgattcggaacctgcaggaattaagaaattatcgaattagacaattactaaattaactaattatgcaattagtaaattaggcgcgccatgcttcatcagactct

SEQ ID NO: 3909 - DNA, 132 bp, Artificial Sequence; identical to SEQ ID NO: 3908
  Synthetic polynucleotide

SEQ ID NO: 3910 - DNA, 180 bp, Artificial Sequence
  Synthetic polynucleotide
atcatctcaccttgcctcctgactcgccctcggaaatacctgcagggttgctcatttagagttgctcattttcggttgctcatttgacgttgctcatttctagttgctcatttactgttgctcattttgcgttgctcatttgtagttgctcatttggcgcgccatgcttcatcagactct

SEQ ID NO: 3911 - DNA, 180 bp, Artificial Sequence; identical to SEQ ID NO: 3910
  Synthetic polynucleotide

SEQ ID NO: 3912 - DNA, 180 bp, Artificial Sequence
  Synthetic polynucleotide
atcatctcaccttgcctcctgctagggactagattggccctgcaggaaaagtaaacaagaaaaagtaaacatcgaaaagtaaacagacaaaagtaaacactaaaaagtaaacaactaaaagtaaacatgcaaaagtaaacagtaaaaagtaaacaggcgcgccatgcttcatcagactct

SEQ ID NO: 3913 - DNA, 180 bp, Artificial Sequence; identical to SEQ ID NO: 3912
  Synthetic polynucleotide

SEQ ID NO: 3914 - DNA, 196 bp, Artificial Sequence
  Synthetic polynucleotide
atcatctcaccttgcctcctgaagatgggtcgcaatatcctgcaggtgccacgtcatcaagatgccacgtcatcatcgtgccacgtcatcagactgccacgtcatcactatgccacgtcatcaacttgccacgtcatcatgctgccacgtcatcagtatgccacgtcatcaggcgcgccatgcttcatcagactct

SEQ ID NO: 3915 - DNA, 196 bp, Artificial Sequence; identical to SEQ ID NO: 3914
  Synthetic polynucleotide

SEQ ID NO: 3916 - DNA, 188 bp, Artificial Sequence
  Synthetic polynucleotide
atcatctcaccttgcctcctgcggctacatcaaggtagcctgcaggaattttacgaccagaaattttacgacctcgaattttacgaccgacaattttacgaccctaaattttacgaccactaattttacgacctgcaattttacgaccgtaaattttacgaccggcgcgccatgcttcatcagactct

SEQ ID NO: 3917 - DNA, 188 bp, Artificial Sequence; identical to SEQ ID NO: 3916
  Synthetic polynucleotide

SEQ ID NO: 3918 - DNA, 196 bp, Artificial Sequence
  Synthetic polynucleotide
atcatctcaccttgcctcctgtcgttatttgtcgcttgcctgcaggacacaggtaagtaagaacacaggtaagtatcgacacaggtaagtagacacacaggtaagtactaacacaggtaagtaactacacaggtaagtatgcacacaggtaagtagtaacacaggtaagtaggcgcgccatgcttcatcagactct

SEQ ID NO: 3919 - DNA, 196 bp, Artificial Sequence; identical to SEQ ID NO: 3918
  Synthetic polynucleotide

SEQ ID NO: 3920 - DNA, 197 bp, Artificial Sequence
  Synthetic polynucleotide
atcatctcaccttgcctcctgtgcgttccggatgatgccctgcagggccaccagggggcacagagccaccagggggcactcggccaccagggggcacgacgccaccagggggcacctagccaccagggggcacactgccaccagggggcactgcgccaccagggggcacgtaggcgcgccatgcttcatcagactct

SEQ ID NO: 3921 - DNA, 197 bp, Artificial Sequence; identical to SEQ ID NO: 3920
  Synthetic polynucleotide

SEQ ID NO: 3922 - DNA, 188 bp, Artificial Sequence
  Synthetic polynucleotide
atcatctcaccttgcctcctgtcaagctcgccgacttgcctgcagggcttgtttacatagagcttgtttacattcggcttgtttacatgacgcttgtttacatctagcttgtttacatactgcttgtttacattgcgcttgtttacatgtagcttgtttacatggcgcgccatgcttcatcagactct

SEQ ID NO: 3923 - DNA, 188 bp, Artificial Sequence; identical to SEQ ID NO: 3922
  Synthetic polynucleotide

SEQ ID NO: 3924 - DNA, 185 bp, Artificial Sequence
  Synthetic polynucleotide
atcatctcaccttgcctcctgttgcacttgagttcaagcctgcaggtaaagtcgtaaaacatagataaagtcgtaaaacattcgtaaagtcgtaaaacatgactaaagtcgtaaaacatctataaagtcgtaaaacatacttaaagtcgtaaaacattgcggcgcgccatgcttcatcagactct

SEQ ID NO: 3925 - DNA, 185 bp, Artificial Sequence; identical to SEQ ID NO: 3924
  Synthetic polynucleotide

SEQ ID NO: 3926 - DNA, 190 bp, Artificial Sequence
  Synthetic polynucleotide
atcatctcaccttgcctcctgaagttccatcaacgtgtcctgcaggtgtttatgtaaatgagatgtttatgtaaatgtcgtgtttatgtaaatggactgtttatgtaaatgctatgtttatgtaaatgacttgtttatgtaaatgtgctgtttatgtaaatggtaggcgcgccatgcttcatcagactct

SEQ ID NO: 3927 - DNA, 190 bp, Artificial Sequence; identical to SEQ ID NO: 3926
  Synthetic polynucleotide

SEQ ID NO: 3928 - DNA, 180 bp, Artificial Sequence
  Synthetic polynucleotide
atcatctcaccttgcctcctgcttattggcgacagcaccctgcaggtatgcaaatcaagatatgcaaatcatcgtatgcaaatcagactatgcaaatcactatatgcaaatcaacttatgcaaatcatgctatgcaaatcagtatatgcaaatcaggcgcgccatgcttcatcagactct

SEQ ID NO: 3929 - DNA, 180 bp, Artificial Sequence; identical to SEQ ID NO: 3928
  Synthetic polynucleotide

SEQ ID NO: 3930 - DNA, 148 bp, Artificial Sequence
  Synthetic polynucleotide
atcatctcaccttgcctcctgctttaacagtctgcgtacctgcaggaagcttgagaaagcttgtcgaagcttggacaagcttgctaaagcttgactaagcttgtgcaagcttggtaaagcttgggcgcgccatgcttcatcagactct

SEQ ID NO: 3931 - DNA, 148 bp, Artificial Sequence; identical to SEQ ID NO: 3930
  Synthetic polynucleotide

SEQ ID NO: 3932 - DNA, 156 bp, Artificial Sequence
  Synthetic polynucleotide
atcatctcaccttgcctcctggcagatgtgacttcagacctgcaggcttccgttagacttccgtttcgcttccgttgaccttccgttctacttccgttactcttccgtttgccttccgttgtacttccgttggcgcgccatgcttcatcagactct

SEQ ID NO: 3933 - DNA, 156 bp, Artificial Sequence; identical to SEQ ID NO: 3932
  Synthetic polynucleotide

SEQ ID NO: 3934 - DNA, 197 bp, Artificial Sequence
  Synthetic polynucleotide
atcatctcaccttgcctcctgaatcccgataagaagagcctgcaggcagtccgaaggtcaccgcagacagtccgaaggtcaccgctcgcagtccgaaggtcaccgcgaccagtccgaaggtcaccgcctacagtccgaaggtcaccgcactcagtccgaaggtcaccgctgcggcgcgccatgcttcatcagactct

SEQ ID NO: 3935 - DNA, 197 bp, Artificial Sequence; identical to SEQ ID NO: 3934
  Synthetic polynucleotide

SEQ ID NO: 3936 - DNA, 172 bp, Artificial Sequence
  Synthetic polynucleotide
atcatctcaccttgcctcctgaagtctgagaagaggtgcctgcagggattgcgtaaagagattgcgtaatcggattgcgtaagacgattgcgtaactagattgcgtaaactgattgcgtaatgcgattgcgtaagtagattgcgtaaggcgcgccatgcttcatcagactct

SEQ ID NO: 3937 - DNA, 172 bp, Artificial Sequence; identical to SEQ ID NO: 3936
  Synthetic polynucleotide

SEQ ID NO: 3938 - DNA, 188 bp, Artificial Sequence
  Synthetic polynucleotide
atcatctcaccttgcctcctgcggtccttaagccctgtcctgcaggaattcctggaaaagaaattcctggaaatcgaattcctggaaagacaattcctggaaactaaattcctggaaaactaattcctggaaatgcaattcctggaaagtaaattcctggaaaggcgcgccatgcttcatcagactct

SEQ ID NO: 3939 - DNA, 188 bp, Artificial Sequence; identical to SEQ ID NO: 3938
  Synthetic polynucleotide

SEQ ID NO: 3940 - DNA, 196 bp, Artificial Sequence
  Synthetic polynucleotide
atcatctcaccttgcctcctgcctcagtcgacttcacacctgcaggctaattaaattagagactaattaaattagtcgctaattaaattaggacctaattaaattagctactaattaaattagactctaattaaattagtgcctaattaaattaggtactaattaaattagggcgcgccatgcttcatcagactct

SEQ ID NO: 3941 - DNA, 196 bp, Artificial Sequence; identical to SEQ ID NO: 3940
  Synthetic polynucleotide

SEQ ID NO: 3942 - DNA, 180 bp, Artificial Sequence
  Synthetic polynucleotide
atcatctcaccttgcctcctgccagcccatctcaacgtcctgcaggagcaataaaaaagaagcaataaaaatcgagcaataaaaagacagcaataaaaactaagcaataaaaaactagcaataaaaatgcagcaataaaaagtaagcaataaaaaggcgcgccatgcttcatcagactct

SEQ ID NO: 3943 - DNA, 180 bp, Artificial Sequence; identical to SEQ ID NO: 3942
  Synthetic polynucleotide

SEQ ID NO: 3944 - DNA, 197 bp, Artificial Sequence
  Synthetic polynucleotide
atcatctcaccttgcctcctgaccggacagcgaacaaccctgcaggaaggtcaactaaaggtcaagaaaggtcaactaaaggtcatcgaaggtcaactaaaggtcagacaaggtcaactaaaggtcactaaaggtcaactaaaggtcaactaaggtcaactaaaggtcatgcggcgcgccatgcttcatcagactct

SEQ ID NO: 3945 - DNA, 197 bp, Artificial Sequence; identical to SEQ ID NO: 3944
  Synthetic polynucleotide

SEQ ID NO: 3946 - DNA, 172 bp, Artificial Sequence
  Synthetic polynucleotide
atcatctcaccttgcctcctgagtgcttaattccgttccctgcaggggggccccccagaggggcccccctcgggggccccccgacggggccccccctaggggccccccactggggcccccctgcggggccccccgtaggggccccccggcgcgccatgcttcatcagactct

SEQ ID NO: 3947 - DNA, 172 bp, Artificial Sequence; identical to SEQ ID NO: 3946
  Synthetic polynucleotide

SEQ ID NO: 3948 - DNA, 180 bp, Artificial Sequence
  Synthetic polynucleotide
atcatctcaccttgcctcctgatatgtaacccactgtgcctgcaggaattgtgcaatagaaattgtgcaattcgaattgtgcaatgacaattgtgcaatctaaattgtgcaatactaattgtgcaattgcaattgtgcaatgtaaattgtgcaatggcgcgccatgcttcatcagactct

SEQ ID NO: 3949 - DNA, 180 bp, Artificial Sequence; identical to SEQ ID NO: 3948
  Synthetic polynucleotide

SEQ ID NO: 3950 - DNA, 196 bp, Artificial Sequence
  Synthetic polynucleotide
atcatctcaccttgcctcctggtatctcttgtcgtccgcctgcaggctaattaaattaaagactaattaaattaatcgctaattaaattaagacctaattaaattaactactaattaaattaaactctaattaaattaatgcctaattaaattaagtactaattaaattaaggcgcgccatgcttcatcagactct

SEQ ID NO: 3951 - DNA, 196 bp, Artificial Sequence; identical to SEQ ID NO: 3950
  Synthetic polynucleotide

SEQ ID NO: 3952 - DNA, 140 bp, Artificial Sequence
  Synthetic polynucleotide
atcatctcaccttgcctcctgcaaactgctactactcccctgcaggcattccagacattcctcgcattccgaccattccctacattccactcattcctgccattccgtacattccggcgcgccatgcttcatcagactct

SEQ ID NO: 3953 - DNA, 140 bp, Artificial Sequence; identical to SEQ ID NO: 3952
  Synthetic polynucleotide

SEQ ID NO: 3954 - DNA, 191 bp, Artificial Sequence
  Synthetic polynucleotide
atcatctcaccttgcctcctgtattgcagcgtgcggcacctgcaggccacgaagaacaccatgtccccaccccagaccacgaagaacaccatgtccccacccctcgccacgaagaacaccatgtccccaccccgacccacgaagaacaccatgtccccaccccctaggcgcgccatgcttcatcagactct

SEQ ID NO: 3955 - DNA, 191 bp, Artificial Sequence; identical to SEQ ID NO: 3954
  Synthetic polynucleotide

SEQ ID NO: 3956 - DNA, 200 bp, Artificial Sequence
  Synthetic polynucleotide
atcatctcaccttgcctcctgcagatgcaagctcttcccctgcagggagggcagccaagcgtgacagagagggcagccaagcgtgactcggagggcagccaagcgtgacgacgagggcagccaagcgtgacctagagggcagccaagcgtgacactgagggcagccaagcgtgacggcgcgccatgcttcatcagactct

SEQ ID NO: 3957 - DNA, 200 bp, Artificial Sequence; identical to SEQ ID NO: 3956
  Synthetic polynucleotide

SEQ ID NO: 3958 - DNA, 197 bp, Artificial Sequence
  Synthetic polynucleotide
atcatctcaccttgcctcctgaaatactccgctaaacccctgcaggttcgcctcaggcaatagattcgcctcaggcaattcgttcgcctcaggcaatgacttcgcctcaggcaatctattcgcctcaggcaatactttcgcctcaggcaattgcttcgcctcaggcaatgtaggcgcgccatgcttcatcagactct

SEQ ID NO: 3959 - DNA, 197 bp, Artificial Sequence; identical to SEQ ID NO: 3958
  Synthetic polynucleotide

SEQ ID NO: 3960 - DNA, 172 bp, Artificial Sequence
  Synthetic polynucleotide
atcatctcaccttgcctcctggacgacatggtaatgtgcctgcaggacggattagcagaacggattagctcgacggattagcgacacggattagcctaacggattagcactacggattagctgcacggattagcgtaacggattagcggcgcgccatgcttcatcagactct

SEQ ID NO: 3961 - DNA, 172 bp, Artificial Sequence; identical to SEQ ID NO: 3960
  Synthetic polynucleotide

SEQ ID NO: 3962 - DNA, 197 bp, Artificial Sequence
  Synthetic polynucleotide
atcatctcaccttgcctcctgcttgagtgatcttaggccctgcagggagcactcatgcgtgacgagagagcactcatgcgtgacgtcggagcactcatgcgtgacggacgagcactcatgcgtgacgctagagcactcatgcgtgacgactgagcactcatgcgtgacgtgcggcgcgccatgcttcatcagactct

SEQ ID NO: 3963 - DNA, 197 bp, Artificial Sequence; identical to SEQ ID NO: 3962
  Synthetic polynucleotide

SEQ ID NO: 3964 - DNA, 191 bp, Artificial Sequence
  Synthetic polynucleotide
atcatctcaccttgcctcctgagatgagggcaccttcacctgcaggaaaattgctgagtcatgagaaaaattgctgagtcatgtcgaaaattgctgagtcatggacaaaattgctgagtcatgctaaaaattgctgagtcatgactaaaattgctgagtcatgtgcggcgcgccatgcttcatcagactct

SEQ ID NO: 3965 - DNA, 191 bp, Artificial Sequence; identical to SEQ ID NO: 3964
  Synthetic polynucleotide

SEQ ID NO: 3966 - DNA, 196 bp, Artificial Sequence
  Synthetic polynucleotide
atcatctcaccttgcctcctggcgccctttacctactccctgcaggagcttgattgatgagaagcttgattgatgtcgagcttgattgatggacagcttgattgatgctaagcttgattgatgactagcttgattgatgtgcagcttgattgatggtaagcttgattgatgggcgcgccatgcttcatcagactct

SEQ ID NO: 3967 - DNA, 196 bp, Artificial Sequence; identical to SEQ ID NO: 3966
  Synthetic polynucleotide

SEQ ID NO: 3968 - DNA, 164 bp, Artificial Sequence
  Synthetic polynucleotide
atcatctcaccttgcctcctgacactatcgaacaagttcctgcaggactaattagagaactaattagtcgactaattaggacactaattagctaactaattagactactaattagtgcactaattaggtaactaattagggcgcgccatgcttcatcagactct

SEQ ID NO: 3969 - DNA, 164 bp, Artificial Sequence; identical to SEQ ID NO: 3968
  Synthetic polynucleotide

SEQ ID NO: 3970 - DNA, 197 bp, Artificial Sequence
  Synthetic polynucleotide
atcatctcaccttgcctcctgtaccacttccctcctgccctgcaggaattgctgactcagcagaaattgctgactcagctcgaattgctgactcagcgacaattgctgactcagcctaaattgctgactcagcactaattgctgactcagctgcaattgctgactcagcgtaggcgcgccatgcttcatcagactct

SEQ ID NO: 3971 - DNA, 197 bp, Artificial Sequence; identical to SEQ ID NO: 3970
  Synthetic polynucleotide

SEQ ID NO: 3972 - DNA, 172 bp, Artificial Sequence
  Synthetic polynucleotide
atcatctcaccttgcctcctgtttggactatgtgggatcctgcaggttacgtcataagattacgtcatatcgttacgtcatagacttacgtcatactattacgtcataactttacgtcatatgcttacgtcatagtattacgtcataggcgcgccatgcttcatcagactct

SEQ ID NO: 3973 - DNA, 172 bp, Artificial Sequence; identical to SEQ ID NO: 3972
  Synthetic polynucleotide

SEQ ID NO: 3974 - DNA, 164 bp, Artificial Sequence
  Synthetic polynucleotide
atcatctcaccttgcctcctgctagatcccggtatcgtcctgcaggcgtacgtcaagacgtacgtcatcgcgtacgtcagaccgtacgtcactacgtacgtcaactcgtacgtcatgccgtacgtcagtacgtacgtcaggcgcgccatgcttcatcagactct

SEQ ID NO: 3975 - DNA, 164 bp, Artificial Sequence; identical to SEQ ID NO: 3974
  Synthetic polynucleotide

SEQ ID NO: 3976 - DNA, 172 bp, Artificial Sequence
  Synthetic polynucleotide
atcatctcaccttgcctcctggctatcagttataagaccctgcaggttcaggtcagagattcaggtcagtcgttcaggtcaggacttcaggtcagctattcaggtcagactttcaggtcagtgcttcaggtcaggtattcaggtcagggcgcgccatgcttcatcagactct

SEQ ID NO: 3977 - DNA, 172 bp, Artificial Sequence; identical to SEQ ID NO: 3976
  Synthetic polynucleotide

SEQ ID NO: 3978 - DNA, 172 bp, Artificial Sequence
  Synthetic polynucleotide
atcatctcaccttgcctcctgctcctgagttgaaggtacctgcagggccacttaaaagagccacttaaatcggccacttaaagacgccacttaaactagccacttaaaactgccacttaaatgcgccacttaaagtagccacttaaaggcgcgccatgcttcatcagactct

SEQ ID NO: 3979 - DNA, 172 bp, Artificial Sequence; identical to SEQ ID NO: 3978
  Synthetic polynucleotide

SEQ ID NO: 3980 - DNA, 172 bp, Artificial Sequence
  Synthetic polynucleotide
atcatctcaccttgcctcctgagagccgttgatgaaagcctgcaggttacgtcatcagattacgtcatctcgttacgtcatcgacttacgtcatcctattacgtcatcactttacgtcatctgcttacgtcatcgtattacgtcatcggcgcgccatgcttcatcagactct

SEQ ID NO: 3981 - DNA, 172 bp, Artificial Sequence; identical to SEQ ID NO: 3980
  Synthetic polynucleotide

SEQ ID NO: 3982 - DNA, 195 bp, Artificial Sequence
  Synthetic polynucleotide
atcatctcaccttgcctcctgcgtgcaaagaagcccagcctgcaggaaacagatacctgaagcgtgaccatacaagaaaacagatacctgaagcgtgaccatacatcgaaacagatacctgaagcgtgaccatacagacaaacagatacctgaagcgtgaccatacactaggcgcgccatgcttcatcagactct

SEQ ID NO: 3983 - DNA, 195 bp, Artificial Sequence; identical to SEQ ID NO: 3982
  Synthetic polynucleotide

SEQ ID NO: 3984 - DNA, 185 bp, Artificial Sequence
  Synthetic polynucleotide
atcatctcaccttgcctcctgatacagaaccaggtaggcctgcaggaagctataaatagaatagaaagctataaatagaattcgaagctataaatagaatgacaagctataaatagaatctaaagctataaatagaatactaagctataaatagaattgcggcgcgccatgcttcatcagactct

SEQ ID NO: 3985 - DNA, 185 bp, Artificial Sequence; identical to SEQ ID NO: 3984
  Synthetic polynucleotide

SEQ ID NO: 3986 - DNA, 188 bp, Artificial Sequence
  Synthetic polynucleotide
atcatctcaccttgcctcctgtccgattcaccagtccgcctgcaggccgcccacgcatagaccgcccacgcattcgccgcccacgcatgacccgcccacgcatctaccgcccacgcatactccgcccacgcattgcccgcccacgcatgtaccgcccacgcatggcgcgccatgcttcatcagactct

SEQ ID NO: 3987 - DNA, 188 bp, Artificial Sequence; identical to SEQ ID NO: 3986
  Synthetic polynucleotide

SEQ ID NO: 3988 - DNA, 185 bp, Artificial Sequence
  Synthetic polynucleotide
atcatctcaccttgcctcctggcaattgtactacactacctgcaggaacaatgttcagtgttagaaacaatgttcagtgtttcgaacaatgttcagtgttgacaacaatgttcagtgttctaaacaatgttcagtgttactaacaatgttcagtgtttgcggcgcgccatgcttcatcagactct

SEQ ID NO: 3989 - DNA, 185 bp, Artificial Sequence; identical to SEQ ID NO: 3988
  Synthetic polynucleotide

SEQ ID NO: 3990 - DNA, 197 bp, Artificial Sequence
  Synthetic polynucleotide
atcatctcaccttgcctcctgccaatgagtcccagtttcctgcaggaggtcagggtgacctggaagaaggtcagggtgacctggatcgaggtcagggtgacctggagacaggtcagggtgacctggactaaggtcagggtgacctggaactaggtcagggtgacctggatgcggcgcgccatgcttcatcagactct

SEQ ID NO: 3991 - DNA, 197 bp, Artificial Sequence; identical to SEQ ID NO: 3990
  Synthetic polynucleotide

SEQ ID NO: 3992 - DNA, 180 bp, Artificial Sequence
  Synthetic polynucleotide
atcatctcaccttgcctcctgtacggctgcattctcgtcctgcagggggggcgtggcagagggggcgtggctcggggggcgtggcgacgggggcgtggcctagggggcgtggcactgggggcgtggctgcgggggcgtggcgtagggggcgtggcggcgcgccatgcttcatcagactct

SEQ ID NO: 3993 - DNA, 180 bp, Artificial Sequence; identical to SEQ ID NO: 3992
  Synthetic polynucleotide

SEQ ID NO: 3994 - DNA, 190 bp, Artificial Sequence
  Synthetic polynucleotide
atcatctcaccttgcctcctgcctactgagtatttacacctgcaggccccggacagcgccagaccccggacagcgcctcgccccggacagcgccgacccccggacagcgccctaccccggacagcgccactccccggacagcgcctgcccccggacagcgccgtaggcgcgccatgcttcatcagactct

SEQ ID NO: 3995 - DNA, 190 bp, Artificial Sequence; identical to SEQ ID NO: 3994
  Synthetic polynucleotide

SEQ ID NO: 3996 - DNA, 197 bp, Artificial Sequence
  Synthetic polynucleotide
atcatctcaccttgcctcctgggacatacaggattgtccctgcaggctccctggcaacagcagactccctggcaacagctcgctccctggcaacagcgacctccctggcaacagcctactccctggcaacagcactctccctggcaacagctgcctccctggcaacagcgtaggcgcgccatgcttcatcagactct

SEQ ID NO: 3997 - DNA, 197 bp, Artificial Sequence; identical to SEQ ID NO: 3996
  Synthetic polynucleotide

SEQ ID NO: 3998 - DNA, 180 bp, Artificial Sequence
  Synthetic polynucleotide
atcatctcaccttgcctcctgccagccgggtctagaaacctgcaggccacgtgctctagaccacgtgctcttcgccacgtgctctgacccacgtgctctctaccacgtgctctactccacgtgctcttgcccacgtgctctgtaccacgtgctctggcgcgccatgcttcatcagactct

SEQ ID NO: 3999 - DNA, 180 bp, Artificial Sequence; identical to SEQ ID NO: 3998
  Synthetic polynucleotide

SEQ ID NO: 4000 - DNA, 196 bp, Artificial Sequence
  Synthetic polynucleotide
atcatctcaccttgcctcctgagcgcgcagtttaacaacctgcagggaaccggaagtggagagaaccggaagtggtcggaaccggaagtgggacgaaccggaagtggctagaaccggaagtggactgaaccggaagtggtgcgaaccggaagtgggtagaaccggaagtggggcgcgccatgcttcatcagactct

SEQ ID NO: 4001 - DNA, 196 bp, Artificial Sequence; identical to SEQ ID NO: 4000
  Synthetic polynucleotide

SEQ ID NO: 4002 - DNA, 180 bp, Artificial Sequence
  Synthetic polynucleotide
atcatctcaccttgcctcctgtgcggttaatcgcttatcctgcaggataaccgttaaagaataaccgttaatcgataaccgttaagacataaccgttaactaataaccgttaaactataaccgttaatgcataaccgttaagtaataaccgttaaggcgcgccatgcttcatcagactct

SEQ ID NO: 4003 - DNA, 180 bp, Artificial Sequence; identical to SEQ ID NO: 4002
  Synthetic polynucleotide

SEQ ID NO: 4004 - DNA, 191 bp, Artificial Sequence
  Synthetic polynucleotide
atcatctcaccttgcctcctgacggaagaaaccagcggcctgcagggatggggtatcatttttagagatggggtatcattttttcggatggggtatcatttttgacgatggggtatcatttttctagatggggtatcatttttactgatggggtatcattttttgcggcgcgccatgcttcatcagactct

SEQ ID NO: 4005 - DNA, 191 bp, Artificial Sequence; identical to SEQ ID NO: 4004
  Synthetic polynucleotide

SEQ ID NO: 4006 - DNA, 188 bp, Artificial Sequence
  Synthetic polynucleotide
atcatctcaccttgcctcctgtagctacacactaagagcctgcaggctaagtaaacaaagactaagtaaacaatcgctaagtaaacaagacctaagtaaacaactactaagtaaacaaactctaagtaaacaatgcctaagtaaacaagtactaagtaaacaaggcgcgccatgcttcatcagactct

SEQ ID NO: 4007 - DNA, 188 bp, Artificial Sequence; identical to SEQ ID NO: 4006
  Synthetic polynucleotide

SEQ ID NO: 4008 - DNA, 164 bp, Artificial Sequence
  Synthetic polynucleotide
atcatctcaccttgcctcctgccagtactacatacggtcctgcagggataaacaaagagataaacaatcggataaacaagacgataaacaactagataaacaaactgataaacaatgcgataaacaagtagataaacaaggcgcgccatgcttcatcagactct

SEQ ID NO: 4009 - DNA, 164 bp, Artificial Sequence; identical to SEQ ID NO: 4008
  Synthetic polynucleotide

SEQ ID NO: 4010 - DNA, 188 bp, Artificial Sequence
  Synthetic polynucleotide
atcatctcaccttgcctcctgctagatcgacatcgtcgcctgcaggtgttacgtaatgagatgttacgtaatgtcgtgttacgtaatggactgttacgtaatgctatgttacgtaatgacttgttacgtaatgtgctgttacgtaatggtatgttacgtaatgggcgcgccatgcttcatcagactct

SEQ ID NO: 4011 - DNA, 188 bp, Artificial Sequence; identical to SEQ ID NO: 4010
  Synthetic polynucleotide

SEQ ID NO: 4012 - DNA, 191 bp, Artificial Sequence
  Synthetic polynucleotide
atcatctcaccttgcctcctgatgtcacgggcagcttgcctgcaggctgacctgaagtgacccagactgacctgaagtgaccctcgctgacctgaagtgacccgacctgacctgaagtgacccctactgacctgaagtgacccactctgacctgaagtgaccctgcggcgcgccatgcttcatcagactct

SEQ ID NO: 4013 - DNA, 191 bp, Artificial Sequence; identical to SEQ ID NO: 4012
  Synthetic polynucleotide

SEQ ID NO: 4014 - DNA, 172 bp, Artificial Sequence
  Synthetic polynucleotide
atcatctcaccttgcctcctgcaatccgcttgctacgtcctgcaggttgtttacaaagattgtttacaatcgttgtttacaagacttgtttacaactattgtttacaaactttgtttacaatgcttgtttacaagtattgtttacaaggcgcgccatgcttcatcagactct

SEQ ID NO: 4015 - DNA, 172 bp, Artificial Sequence; identical to SEQ ID NO: 4014
  Synthetic polynucleotide

SEQ ID NO: 4016 - DNA, 191 bp, Artificial Sequence
  Synthetic polynucleotide
atcatctcaccttgcctcctgctaaagggtgaacatgtcctgcaggacttagttaactaaaaaagaacttagttaactaaaaatcgacttagttaactaaaaagacacttagttaactaaaaactaacttagttaactaaaaaactacttagttaactaaaaatgcggcgcgccatgcttcatcagactct

SEQ ID NO: 4017 - DNA, 191 bp, Artificial Sequence; identical to SEQ ID NO: 4016
  Synthetic polynucleotide

SEQ ID NO: 4018 - DNA, 172 bp, Artificial Sequence
  Synthetic polynucleotide
atcatctcaccttgcctcctgggaactttgtctgttagcctgcagggtgtgagtcaagagtgtgagtcatcggtgtgagtcagacgtgtgagtcactagtgtgagtcaactgtgtgagtcatgcgtgtgagtcagtagtgtgagtcaggcgcgccatgcttcatcagactct

SEQ ID NO: 4019 - DNA, 172 bp, Artificial Sequence; identical to SEQ ID NO: 4018
  Synthetic polynucleotide

SEQ ID NO: 4020 - DNA, 172 bp, Artificial Sequence
  Synthetic polynucleotide
atcatctcaccttgcctcctgtgagaccctttaggtaccctgcaggttgatatgcaagattgatatgcatcgttgatatgcagacttgatatgcactattgatatgcaactttgatatgcatgcttgatatgcagtattgatatgcaggcgcgccatgcttcatcagactct

SEQ ID NO: 4021 - DNA, 172 bp, Artificial Sequence; identical to SEQ ID NO: 4020
  Synthetic polynucleotide

SEQ ID NO: 4022 - DNA, 164 bp, Artificial Sequence
  Synthetic polynucleotide
atcatctcaccttgcctcctgcaaactgttatgcagcgcctgcaggacacctgctagaacacctgcttcgacacctgctgacacacctgctctaacacctgctactacacctgcttgcacacctgctgtaacacctgctggcgcgccatgcttcatcagactct

SEQ ID NO: 4023 - DNA, 164 bp, Artificial Sequence; identical to SEQ ID NO: 4022
  Synthetic polynucleotide

SEQ ID NO: 4024 - DNA, 180 bp, Artificial Sequence
  Synthetic polynucleotide
atcatctcaccttgcctcctgttcagtacgagactctacctgcaggtgctgagtcacagatgctgagtcactcgtgctgagtcacgactgctgagtcacctatgctgagtcacacttgctgagtcactgctgctgagtcacgtatgctgagtcacggcgcgccatgcttcatcagactct

SEQ ID NO: 4025 - DNA, 180 bp, Artificial Sequence; identical to SEQ ID NO: 4024
  Synthetic polynucleotide

SEQ ID NO: 4026 - DNA, 191 bp, Artificial Sequence
  Synthetic polynucleotide
atcatctcaccttgcctcctgaggaccggcaaccgaaacctgcagggggggggggagggagggagagggggggggagggagggtcggggggggggagggaggggacgggggggggagggagggctagggggggggagggagggactgggggggggagggagggtgcggcgcgccatgcttcatcagactct

SEQ ID NO: 4027 - DNA, 191 bp, Artificial Sequence; identical to SEQ ID NO: 4026
  Synthetic polynucleotide

SEQ ID NO: 4028 - DNA, 190 bp, Artificial Sequence
  Synthetic polynucleotide
atcatctcaccttgcctcctggactcgcgccctagtaacctgcagggcgtacgtgcggcaagagcgtacgtgcggcatcggcgtacgtgcggcagacgcgtacgtgcggcactagcgtacgtgcggcaactgcgtacgtgcggcatgcgcgtacgtgcggcagtaggcgcgccatgcttcatcagactct

SEQ ID NO: 4029 - DNA, 190 bp, Artificial Sequence; identical to SEQ ID NO: 4028
  Synthetic polynucleotide

SEQ ID NO: 4030 - DNA, 188 bp, Artificial Sequence
  Synthetic polynucleotide
atcatctcaccttgcctcctggcacgatatggaatatgcctgcaggtgttacgtaataagatgttacgtaatatcgtgttacgtaatagactgttacgtaatactatgttacgtaataacttgttacgtaatatgctgttacgtaatagtatgttacgtaataggcgcgccatgcttcatcagactct

SEQ ID NO: 4031 - DNA, 188 bp, Artificial Sequence; identical to SEQ ID NO: 4030
  Synthetic polynucleotide

SEQ ID NO: 4032 - DNA, 148 bp, Artificial Sequence
  Synthetic polynucleotide
atcatctcaccttgcctcctgtcttgtacgttctttaccctgcaggttcctctagattcctcttcgttcctctgacttcctctctattcctctactttcctcttgcttcctctgtattcctctggcgcgccatgcttcatcagactct

SEQ ID NO: 4033 - DNA, 148 bp, Artificial Sequence; identical to SEQ ID NO: 4032
  Synthetic polynucleotide

SEQ ID NO: 4034 - DNA, 148 bp, Artificial Sequence
  Synthetic polynucleotide
atcatctcaccttgcctcctgtgaacaccgtctttctccctgcaggtcaagtgagatcaagtgtcgtcaagtggactcaagtgctatcaagtgacttcaagtgtgctcaagtggtatcaagtgggcgcgccatgcttcatcagactct

SEQ ID NO: 4035 - DNA, 148 bp, Artificial Sequence; identical to SEQ ID NO: 4034
  Synthetic polynucleotide

SEQ ID NO: 4036 - DNA, 188 bp, Artificial Sequence
  Synthetic polynucleotide
atcatctcaccttgcctcctgactgccctaacatcactcctgcaggtctcaagtggccagatctcaagtggcctcgtctcaagtggccgactctcaagtggccctatctcaagtggccacttctcaagtggcctgctctcaagtggccgtatctcaagtggccggcgcgccatgcttcatcagactct

SEQ ID NO: 4037 - DNA, 188 bp, Artificial Sequence; identical to SEQ ID NO: 4036
  Synthetic polynucleotide

SEQ ID NO: 4038 - DNA, 164 bp, Artificial Sequence
  Synthetic polynucleotide
atcatctcaccttgcctcctgaagtgagggagtgaaggcctgcaggttgacttttagattgactttttcgttgacttttgacttgacttttctattgacttttactttgactttttgcttgacttttgtattgacttttggcgcgccatgcttcatcagactct

SEQ ID NO: 4039 - DNA, 164 bp, Artificial Sequence; identical to SEQ ID NO: 4038
  Synthetic polynucleotide

SEQ ID NO: 4040 - DNA, 185 bp, Artificial Sequence
  Synthetic polynucleotide
atcatctcaccttgcctcctgggttggtcaggaggatacctgcaggaagctataaatagactagaaagctataaatagacttcgaagctataaatagactgacaagctataaatagactctaaagctataaatagactactaagctataaatagacttgcggcgcgccatgcttcatcagactct

SEQ ID NO: 4041 - DNA, 185 bp, Artificial Sequence; identical to SEQ ID NO: 4040
  Synthetic polynucleotide

SEQ ID NO: 4042 - DNA, 191 bp, Artificial Sequence
  Synthetic polynucleotide
atcatctcaccttgcctcctgctcacttcagcaaagcacctgcaggtagtactaattagttcgagatagtactaattagttcgtcgtagtactaattagttcggactagtactaattagttcgctatagtactaattagttcgacttagtactaattagttcgtgcggcgcgccatgcttcatcagactct

SEQ ID NO: 4043 - DNA, 191 bp, Artificial Sequence; identical to SEQ ID NO: 4042
  Synthetic polynucleotide

SEQ ID NO: 4044 - DNA, 180 bp, Artificial Sequence
  Synthetic polynucleotide
atcatctcaccttgcctcctgtctcctgttacctgcgccctgcaggtgctgagtcatagatgctgagtcattcgtgctgagtcatgactgctgagtcatctatgctgagtcatacttgctgagtcattgctgctgagtcatgtatgctgagtcatggcgcgccatgcttcatcagactct

SEQ ID NO: 4045 - DNA, 180 bp, Artificial Sequence; identical to SEQ ID NO: 4044
  Synthetic polynucleotide

SEQ ID NO: 4046 - DNA, 180 bp, Artificial Sequence
  Synthetic polynucleotide
atcatctcaccttgcctcctggtttgatccgagatttgcctgcaggtgatttatggcagatgatttatggctcgtgatttatggcgactgatttatggcctatgatttatggcacttgatttatggctgctgatttatggcgtatgatttatggcggcgcgccatgcttcatcagactct

SEQ ID NO: 4047 - DNA, 180 bp, Artificial Sequence; identical to SEQ ID NO: 4046
  Synthetic polynucleotide

SEQ ID NO: 4048 - DNA, 197 bp, Artificial Sequence
  Synthetic polynucleotide
atcatctcaccttgcctcctgatcaggtcaatgcagtccctgcaggtacgcccacgcatttagatacgcccacgcattttcgtacgcccacgcatttgactacgcccacgcatttctatacgcccacgcatttacttacgcccacgcattttgctacgcccacgcatttgtaggcgcgccatgcttcatcagactct

SEQ ID NO: 4049 - DNA, 197 bp, Artificial Sequence; identical to SEQ ID NO: 4048
  Synthetic polynucleotide

SEQ ID NO: 4050 - DNA, 197 bp, Artificial Sequence
  Synthetic polynucleotide
atcatctcaccttgcctcctggatctgcaccaccttgtcctgcaggtactggagagaaaccagatactggagagaaacctcgtactggagagaaaccgactactggagagaaaccctatactggagagaaaccacttactggagagaaacctgctactggagagaaaccgtaggcgcgccatgcttcatcagactct

SEQ ID NO: 4051 - DNA, 197 bp, Artificial Sequence; identical to SEQ ID NO: 4050
  Synthetic polynucleotide

SEQ ID NO: 4052 - DNA, 172 bp, Artificial Sequence
  Synthetic polynucleotide
atcatctcaccttgcctcctggccgtataggctgttcgcctgcaggaaagtcaattagaaaagtcaatttcgaaagtcaattgacaaagtcaattctaaaagtcaattactaaagtcaatttgcaaagtcaattgtaaaagtcaattggcgcgccatgcttcatcagactct

SEQ ID NO: 4053 - DNA, 172 bp, Artificial Sequence; identical to SEQ ID NO: 4052
  Synthetic polynucleotide

SEQ ID NO: 4054 - DNA, 185 bp, Artificial Sequence
  Synthetic polynucleotide
atcatctcaccttgcctcctgataggcaatagacgctacctgcaggttgcggtttgcggttaagattgcggtttgcggttatcgttgcggtttgcggttagacttgcggtttgcggttactattgcggtttgcggttaactttgcggtttgcggttatgcggcgcgccatgcttcatcagactct

SEQ ID NO: 4055 - DNA, 185 bp, Artificial Sequence; identical to SEQ ID NO: 4054
  Synthetic polynucleotide

SEQ ID NO: 4056 - DNA, 191 bp, Artificial Sequence
  Synthetic polynucleotide
atcatctcaccttgcctcctgccttatgtgatgatgctcctgcaggcccaaaagaacaccgtgtacctcccctagacccaaaagaacaccgtgtacctccccttcgcccaaaagaacaccgtgtacctcccctgaccccaaaagaacaccgtgtacctcccctctaggcgcgccatgcttcatcagactct

SEQ ID NO: 4057 - DNA, 191 bp, Artificial Sequence; identical to SEQ ID NO: 4056
  Synthetic polynucleotide

SEQ ID NO: 4058 - DNA, 191 bp, Artificial Sequence
  Synthetic polynucleotide
atcatctcaccttgcctcctggtctaccaaggccgatccctgcaggaatcactgaaattgattagaaatcactgaaattgatttcgaatcactgaaattgattgacaatcactgaaattgattctaaatcactgaaattgattactaatcactgaaattgatttgcggcgcgccatgcttcatcagactct

SEQ ID NO: 4059 - DNA, 191 bp, Artificial Sequence; identical to SEQ ID NO: 4058
  Synthetic polynucleotide

SEQ ID NO: 4060 - DNA, 197 bp, Artificial Sequence
  Synthetic polynucleotide
atcatctcaccttgcctcctgtggctcgtgtaaccgaacctgcaggttcgttgtatgcgggagattcgttgtatgcgggtcgttcgttgtatgcggggacttcgttgtatgcgggctattcgttgtatgcgggactttcgttgtatgcgggtgcttcgttgtatgcggggtaggcgcgccatgcttcatcagactct

SEQ ID NO: 4061 - DNA, 197 bp, Artificial Sequence; identical to SEQ ID NO: 4060
  Synthetic polynucleotide

SEQ ID NO: 4062 - DNA, 172 bp, Artificial Sequence
  Synthetic polynucleotide
atcatctcaccttgcctcctgcccaggttaaaggtggacctgcaggtgactcacacagatgactcacactcgtgactcacacgactgactcacacctatgactcacacacttgactcacactgctgactcacacgtatgactcacacggcgcgccatgcttcatcagactct

SEQ ID NO: 4063 - DNA, 172 bp, Artificial Sequence; identical to SEQ ID NO: 4062
  Synthetic polynucleotide

SEQ ID NO: 4064 - DNA, 172 bp, Artificial Sequence
  Synthetic polynucleotide
atcatctcaccttgcctcctgttgcacacactgctagacctgcaggttaagtgcttagattaagtgctttcgttaagtgcttgacttaagtgcttctattaagtgcttactttaagtgctttgcttaagtgcttgtattaagtgcttggcgcgccatgcttcatcagactct

SEQ ID NO: 4065 - DNA, 172 bp, Artificial Sequence; identical to SEQ ID NO: 4064
  Synthetic polynucleotide

SEQ ID NO: 4066 - DNA, 172 bp, Artificial Sequence
  Synthetic polynucleotide
atcatctcaccttgcctcctggtcagcaactttactcacctgcaggggtttcggtcagaggtttcggtctcgggtttcggtcgacggtttcggtcctaggtttcggtcactggtttcggtctgcggtttcggtcgtaggtttcggtcggcgcgccatgcttcatcagactct

SEQ ID NO: 4067 - DNA, 172 bp, Artificial Sequence; identical to SEQ ID NO: 4066
  Synthetic polynucleotide

SEQ ID NO: 4068 - DNA, 196 bp, Artificial Sequence
  Synthetic polynucleotide
atcatctcaccttgcctcctggcaacctatcaacccgtcctgcaggttaatttaattagagattaatttaattagtcgttaatttaattaggacttaatttaattagctattaatttaattagactttaatttaattagtgcttaatttaattaggtattaatttaattagggcgcgccatgcttcatcagactct

SEQ ID NO: 4069 - DNA, 196 bp, Artificial Sequence; identical to SEQ ID NO: 4068
  Synthetic polynucleotide

SEQ ID NO: 4070 - DNA, 148 bp, Artificial Sequence
  Synthetic polynucleotide
atcatctcaccttgcctcctgtgtgcaatatggatgaacctgcaggtgatttcagatgatttctcgtgatttcgactgatttcctatgatttcacttgatttctgctgatttcgtatgatttcggcgcgccatgcttcatcagactct

SEQ ID NO: 4071 - DNA, 148 bp, Artificial Sequence; identical to SEQ ID NO: 4070
  Synthetic polynucleotide

SEQ ID NO: 4072 - DNA, 185 bp, Artificial Sequence
  Synthetic polynucleotide
atcatctcaccttgcctcctgacaacttagagacgctccctgcagggcattaattagttcgcagagcattaattagttcgctcggcattaattagttcgcgacgcattaattagttcgcctagcattaattagttcgcactgcattaattagttcgctgcggcgcgccatgcttcatcagactct

SEQ ID NO: 4073 - DNA, 185 bp, Artificial Sequence; identical to SEQ ID NO: 4072
  Synthetic polynucleotide

SEQ ID NO: 4074 - DNA, 191 bp, Artificial Sequence
  Synthetic polynucleotide
atcatctcaccttgcctcctgtcgatctatgcggagtacctgcaggtaaactaattagctgtaagataaactaattagctgtatcgtaaactaattagctgtagactaaactaattagctgtactataaactaattagctgtaacttaaactaattagctgtatgcggcgcgccatgcttcatcagactct

SEQ ID NO: 4075 - DNA, 191 bp, Artificial Sequence; identical to SEQ ID NO: 4074
  Synthetic polynucleotide

SEQ ID NO: 4076 - DNA, 196 bp, Artificial Sequence
  Synthetic polynucleotide
atcatctcaccttgcctcctgagaggagcaggtatattcctgcaggttaatttaattaaagattaatttaattaatcgttaatttaattaagacttaatttaattaactattaatttaattaaactttaatttaattaatgcttaatttaattaagtattaatttaattaaggcgcgccatgcttcatcagactct

SEQ ID NO: 4077 - DNA, 196 bp, Artificial Sequence; identical to SEQ ID NO: 4076
  Synthetic polynucleotide

SEQ ID NO: 4078 - DNA, 190 bp, Artificial Sequence
  Synthetic polynucleotide
atcatctcaccttgcctcctgtcactctcccgaaagcccctgcaggaatacccgcatgtgagaaatacccgcatgtgtcgaatacccgcatgtggacaatacccgcatgtgctaaatacccgcatgtgactaatacccgcatgtgtgcaatacccgcatgtggtaggcgcgccatgcttcatcagactct

SEQ ID NO: 4079 - DNA, 190 bp, Artificial Sequence; identical to SEQ ID NO: 4078
  Synthetic polynucleotide

SEQ ID NO: 4080 - DNA, 200 bp, Artificial Sequence
  Synthetic polynucleotide
atcatctcaccttgcctcctgtattgtgaaccgtgcaccctgcaggatgttaaatgtagattaagagaatgttaaatgtagattaagtcgatgttaaatgtagattaaggacatgttaaatgtagattaagctaatgttaaatgtagattaagactatgttaaatgtagattaagggcgcgccatgcttcatcagactct

SEQ ID NO: 4081 - DNA, 200 bp, Artificial Sequence; identical to SEQ ID NO: 4080
  Synthetic polynucleotide

SEQ ID NO: 4082 - DNA, 188 bp, Artificial Sequence
  Synthetic polynucleotide
atcatctcaccttgcctcctgacaacggccgctttctgcctgcaggtcgcatatgttgagatcgcatatgttgtcgtcgcatatgttggactcgcatatgttgctatcgcatatgttgacttcgcatatgttgtgctcgcatatgttggtatcgcatatgttgggcgcgccatgcttcatcagactct

SEQ ID NO: 4083 - DNA, 188 bp, Artificial Sequence; identical to SEQ ID NO: 4082
  Synthetic polynucleotide

SEQ ID NO: 4084 - DNA, 180 bp, Artificial Sequence
  Synthetic polynucleotide
atcatctcaccttgcctcctgtgggcaatggcctgcatcctgcaggtgcgtgggcgtagatgcgtgggcgttcgtgcgtgggcgtgactgcgtgggcgtctatgcgtgggcgtacttgcgtgggcgttgctgcgtgggcgtgtatgcgtgggcgtggcgcgccatgcttcatcagactct

SEQ ID NO: 4085 - DNA, 180 bp, Artificial Sequence; identical to SEQ ID NO: 4084
  Synthetic polynucleotide

SEQ ID NO: 4086 - DNA, 197 bp, Artificial Sequence
  Synthetic polynucleotide
atcatctcaccttgcctcctgcctcatagcggagaatgcctgcagggagtccaaagtccagagagagtccaaagtccagtcggagtccaaagtccaggacgagtccaaagtccagctagagtccaaagtccagactgagtccaaagtccagtgcgagtccaaagtccaggtaggcgcgccatgcttcatcagactct

SEQ ID NO: 4087 - DNA, 197 bp, Artificial Sequence; identical to SEQ ID NO: 4086
  Synthetic polynucleotide

SEQ ID NO: 4088 - DNA, 196 bp, Artificial Sequence
  Synthetic polynucleotide
atcatctcaccttgcctcctgtgcgggaatcgaacgaccctgcagggtattggtcacgtgactcttccagagtattggtcacgtgactcttcctcggtattggtcacgtgactcttccgacgtattggtcacgtgactcttccctagtattggtcacgtgactcttccactggcgcgccatgcttcatcagactct

SEQ ID NO: 4089 - DNA, 196 bp, Artificial Sequence; identical to SEQ ID NO: 4088
  Synthetic polynucleotide

SEQ ID NO: 4090 - DNA, 190 bp, Artificial Sequence
  Synthetic polynucleotide
atcatctcaccttgcctcctgtgaagtacggagactaacctgcaggtacgcccacgcattagatacgcccacgcatttcgtacgcccacgcattgactacgcccacgcattctatacgcccacgcattacttacgcccacgcatttgctacgcccacgcattgtaggcgcgccatgcttcatcagactct

SEQ ID NO: 4091 - DNA, 190 bp, Artificial Sequence; identical to SEQ ID NO: 4090
  Synthetic polynucleotide

SEQ ID NO: 4092 - DNA, 191 bp, Artificial Sequence
  Synthetic polynucleotide
atcatctcaccttgcctcctgaccatctgctacgttcacctgcaggatcgataactgatcgatagaatcgataactgatcgattcgatcgataactgatcgatgacatcgataactgatcgatctaatcgataactgatcgatactatcgataactgatcgattgcggcgcgccatgcttcatcagactct

SEQ ID NO: 4093 - DNA, 191 bp, Artificial Sequence; identical to SEQ ID NO: 4092
  Synthetic polynucleotide

SEQ ID NO: 4094 - DNA, 197 bp, Artificial Sequence
  Synthetic polynucleotide
atcatctcaccttgcctcctgtcgtgtgcgcaaactcccctgcaggaaggtcaaaggtcaaagaaaggtcaaaggtcaatcgaaggtcaaaggtcaagacaaggtcaaaggtcaactaaaggtcaaaggtcaaactaaggtcaaaggtcaatgcaaggtcaaaggtcaagtaggcgcgccatgcttcatcagactct

SEQ ID NO: 4095 - DNA, 197 bp, Artificial Sequence; identical to SEQ ID NO: 4094
  Synthetic polynucleotide

SEQ ID NO: 4096 - DNA, 172 bp, Artificial Sequence
  Synthetic polynucleotide
atcatctcaccttgcctcctggtgaccttcagagaagacctgcaggctgactcatcagactgactcatctcgctgactcatcgacctgactcatcctactgactcatcactctgactcatctgcctgactcatcgtactgactcatcggcgcgccatgcttcatcagactct

SEQ ID NO: 4097 - DNA, 172 bp, Artificial Sequence; identical to SEQ ID NO: 4096
  Synthetic polynucleotide

SEQ ID NO: 4098 - DNA, 197 bp, Artificial Sequence
  Synthetic polynucleotide
atcatctcaccttgcctcctgtgaagttgtcgtaactgcctgcaggtgggttatttttaaaccgagatgggttatttttaaaccgtcgtgggttatttttaaaccggactgggttatttttaaaccgctatgggttatttttaaaccgacttgggttatttttaaaccgtgcggcgcgccatgcttcatcagactct

SEQ ID NO: 4099 - DNA, 197 bp, Artificial Sequence; identical to SEQ ID NO: 4098
  Synthetic polynucleotide

SEQ ID NO: 4100 - DNA, 164 bp, Artificial Sequence
  Synthetic polynucleotide
atcatctcaccttgcctcctgtcctggccgccattgaacctgcaggtcgcgtgatagatcgcgtgattcgtcgcgtgatgactcgcgtgatctatcgcgtgatacttcgcgtgattgctcgcgtgatgtatcgcgtgatggcgcgccatgcttcatcagactct

SEQ ID NO: 4101 - DNA, 164 bp, Artificial Sequence; identical to SEQ ID NO: 4100
  Synthetic polynucleotide

SEQ ID NO: 4102 - DNA, 190 bp, Artificial Sequence
  Synthetic polynucleotide
atcatctcaccttgcctcctgtgaggactatcccgcaacctgcaggtaggacaaaggtcaagataggacaaaggtcatcgtaggacaaaggtcagactaggacaaaggtcactataggacaaaggtcaacttaggacaaaggtcatgctaggacaaaggtcagtaggcgcgccatgcttcatcagactct

SEQ ID NO: 4103 - DNA, 190 bp, Artificial Sequence; identical to SEQ ID NO: 4102
  Synthetic polynucleotide

SEQ ID NO: 4104 - DNA, 191 bp, Artificial Sequence
  Synthetic polynucleotide
atcatctcaccttgcctcctgattcaagcgtcaggtaccctgcaggttggttaataattaactagattggttaataattaacttcgttggttaataattaactgacttggttaataattaactctattggttaataattaactactttggttaataattaacttgcggcgcgccatgcttcatcagactct

SEQ ID NO: 4105 - DNA, 191 bp, Artificial Sequence; identical to SEQ ID NO: 4104
  Synthetic polynucleotide

SEQ ID NO: 4106 - DNA, 172 bp, Artificial Sequence
  Synthetic polynucleotide
atcatctcaccttgcctcctgtatcagtcaacgttacccctgcaggatgacgtcacagaatgacgtcactcgatgacgtcacgacatgacgtcacctaatgacgtcacactatgacgtcactgcatgacgtcacgtaatgacgtcacggcgcgccatgcttcatcagactct

SEQ ID NO: 4107 - DNA, 172 bp, Artificial Sequence; identical to SEQ ID NO: 4106
  Synthetic polynucleotide

SEQ ID NO: 4108 - DNA, 188 bp, Artificial Sequence
  Synthetic polynucleotide
atcatctcaccttgcctcctggtcctggtgtacttaaacctgcaggaatggcgccaaaagaaatggcgccaaatcgaatggcgccaaagacaatggcgccaaactaaatggcgccaaaactaatggcgccaaatgcaatggcgccaaagtaaatggcgccaaaggcgcgccatgcttcatcagactct

SEQ ID NO: 4109 - DNA, 188 bp, Artificial Sequence; identical to SEQ ID NO: 4108
  Synthetic polynucleotide

SEQ ID NO: 4110 - DNA, 156 bp, Artificial Sequence
  Synthetic polynucleotide
atcatctcaccttgcctcctgtcctaaaggtggtagctcctgcaggatgtttacagaatgtttactcgatgtttacgacatgtttacctaatgtttacactatgtttactgcatgtttacgtaatgtttacggcgcgccatgcttcatcagactct

SEQ ID NO: 4111 - DNA, 156 bp, Artificial Sequence; identical to SEQ ID NO: 4110
  Synthetic polynucleotide

SEQ ID NO: 4112 - DNA, 156 bp, Artificial Sequence
  Synthetic polynucleotide
atcatctcaccttgcctcctgccttgctattcatcagccctgcaggccagtagcagaccagtagctcgccagtagcgacccagtagcctaccagtagcactccagtagctgcccagtagcgtaccagtagcggcgcgccatgcttcatcagactct

SEQ ID NO: 4113 - DNA, 156 bp, Artificial Sequence; identical to SEQ ID NO: 4112
  Synthetic polynucleotide

SEQ ID NO: 4114 - DNA, 186 bp, Artificial Sequence
  Synthetic polynucleotide
atcatctcaccttgcctcctgaattcccaacgcgcgaccctgcaggcaaaggtcaaattgaggtcaagacaaaggtcaaattgaggtcatcgcaaaggtcaaattgaggtcagaccaaaggtcaaattgaggtcactacaaaggtcaaattgaggtcaactggcgcgccatgcttcatcagactct

SEQ ID NO: 4115 - DNA, 186 bp, Artificial Sequence; identical to SEQ ID NO: 4114
  Synthetic polynucleotide

SEQ ID NO: 4116 - DNA, 191 bp, Artificial Sequence
  Synthetic polynucleotide
atcatctcaccttgcctcctgttcgctacgactgtgatcctgcaggcgaactaattagtactaagacgaactaattagtactatcgcgaactaattagtactagaccgaactaattagtactactacgaactaattagtactaactcgaactaattagtactatgcggcgcgccatgcttcatcagactct

SEQ ID NO: 4117 - DNA, 191 bp, Artificial Sequence; identical to SEQ ID NO: 4116
  Synthetic polynucleotide

SEQ ID NO: 4118 - DNA, 191 bp, Artificial Sequence
  Synthetic polynucleotide
atcatctcaccttgcctcctgcatccatttaattgcctcctgcaggaaatcgattttcgttttagaaaatcgattttcgtttttcgaaatcgattttcgttttgacaaatcgattttcgttttctaaaatcgattttcgttttactaaatcgattttcgtttttgcggcgcgccatgcttcatcagactct

SEQ ID NO: 4119 - DNA, 191 bp, Artificial Sequence; identical to SEQ ID NO: 4118
  Synthetic polynucleotide

SEQ ID NO: 4120 - DNA, 156 bp, Artificial Sequence
  Synthetic polynucleotide
atcatctcaccttgcctcctggaacccaaatagagttccctgcagggctaatgaagagctaatgatcggctaatgagacgctaatgactagctaatgaactgctaatgatgcgctaatgagtagctaatgaggcgcgccatgcttcatcagactct

SEQ ID NO: 4121 - DNA, 156 bp, Artificial Sequence; identical to SEQ ID NO: 4120
  Synthetic polynucleotide

SEQ ID NO: 4122 - DNA, 188 bp, Artificial Sequence
  Synthetic polynucleotide
atcatctcaccttgcctcctgtcctttggagactgatccctgcaggcctgggtggtccagacctgggtggtcctcgcctgggtggtccgaccctgggtggtccctacctgggtggtccactcctgggtggtcctgccctgggtggtccgtacctgggtggtccggcgcgccatgcttcatcagactct

SEQ ID NO: 4123 - DNA, 188 bp, Artificial Sequence; identical to SEQ ID NO: 4122
  Synthetic polynucleotide

SEQ ID NO: 4124 - DNA, 164 bp, Artificial Sequence
  Synthetic polynucleotide
atcatctcaccttgcctcctgtaagcaggagatgctcccctgcaggttaacagcgagattaacagcgtcgttaacagcggacttaacagcgctattaacagcgactttaacagcgtgcttaacagcggtattaacagcgggcgcgccatgcttcatcagactct

SEQ ID NO: 4125 - DNA, 164 bp, Artificial Sequence; identical to SEQ ID NO: 4124
  Synthetic polynucleotide

SEQ ID NO: 4126 - DNA, 172 bp, Artificial Sequence
  Synthetic polynucleotide
atcatctcaccttgcctcctggcgaaacagatggcttgcctgcaggtctattgcccagatctattgccctcgtctattgcccgactctattgcccctatctattgcccacttctattgccctgctctattgcccgtatctattgcccggcgcgccatgcttcatcagactct

SEQ ID NO: 4127 - DNA, 172 bp, Artificial Sequence; identical to SEQ ID NO: 4126
  Synthetic polynucleotide

SEQ ID NO: 4128 - DNA, 180 bp, Artificial Sequence
  Synthetic polynucleotide
atcatctcaccttgcctcctggataaacgtaccttatccctgcagggcagcagctgtagagcagcagctgttcggcagcagctgtgacgcagcagctgtctagcagcagctgtactgcagcagctgttgcgcagcagctgtgtagcagcagctgtggcgcgccatgcttcatcagactct

SEQ ID NO: 4129 - DNA, 180 bp, Artificial Sequence; identical to SEQ ID NO: 4128
  Synthetic polynucleotide

SEQ ID NO: 4130 - DNA, 188 bp, Artificial Sequence
  Synthetic polynucleotide
atcatctcaccttgcctcctgatacccggtgtacgcttcctgcagggacgtgtcattaagagacgtgtcattatcggacgtgtcattagacgacgtgtcattactagacgtgtcattaactgacgtgtcattatgcgacgtgtcattagtagacgtgtcattaggcgcgccatgcttcatcagactct

SEQ ID NO: 4131 - DNA, 188 bp, Artificial Sequence; identical to SEQ ID NO: 4130
  Synthetic polynucleotide

SEQ ID NO: 4132 - DNA, 197 bp, Artificial Sequence
  Synthetic polynucleotide
atcatctcaccttgcctcctgaatgagccttcccactgcctgcagggggggtatgcgtcatagagggggtatgcgtcattcggggggtatgcgtcatgacgggggtatgcgtcatctagggggtatgcgtcatactgggggtatgcgtcattgcgggggtatgcgtcatgtaggcgcgccatgcttcatcagactct

SEQ ID NO: 4133 - DNA, 197 bp, Artificial Sequence; identical to SEQ ID NO: 4132
  Synthetic polynucleotide

SEQ ID NO: 4134 - DNA, 164 bp, Artificial Sequence
  Synthetic polynucleotide
atcatctcaccttgcctcctgcatcctgaacgtgcatgcctgcaggtacttccttagatacttcctttcgtacttccttgactacttccttctatacttccttacttacttcctttgctacttccttgtatacttccttggcgcgccatgcttcatcagactct

SEQ ID NO: 4135 - DNA, 164 bp, Artificial Sequence; identical to SEQ ID NO: 4134
  Synthetic polynucleotide

SEQ ID NO: 4136 - DNA, 197 bp, Artificial Sequence
  Synthetic polynucleotide
atcatctcaccttgcctcctgtaatgggtgggatatgccctgcaggcatctccttatatggagacatctccttatatggtcgcatctccttatatgggaccatctccttatatggctacatctccttatatggactcatctccttatatggtgccatctccttatatgggtaggcgcgccatgcttcatcagactct

SEQ ID NO: 4137 - DNA, 197 bp, Artificial Sequence; identical to SEQ ID NO: 4136
  Synthetic polynucleotide

SEQ ID NO: 4138 - DNA, 196 bp, Artificial Sequence
  Synthetic polynucleotide
atcatctcaccttgcctcctgcggcagatagtctacctcctgcaggttaatctaattaaagattaatctaattaatcgttaatctaattaagacttaatctaattaactattaatctaattaaactttaatctaattaatgcttaatctaattaagtattaatctaattaaggcgcgccatgcttcatcagactct

SEQ ID NO: 4139 - DNA, 196 bp, Artificial Sequence; identical to SEQ ID NO: 4138
  Synthetic polynucleotide

SEQ ID NO: 4140 - DNA, 172 bp, Artificial Sequence
  Synthetic polynucleotide
atcatctcaccttgcctcctggctagtgccaatgggaccctgcaggatgacgtcatagaatgacgtcattcgatgacgtcatgacatgacgtcatctaatgacgtcatactatgacgtcattgcatgacgtcatgtaatgacgtcatggcgcgccatgcttcatcagactct

SEQ ID NO: 4141 - DNA, 172 bp, Artificial Sequence; identical to SEQ ID NO: 4140
  Synthetic polynucleotide

SEQ ID NO: 4142 - DNA, 185 bp, Artificial Sequence
  Synthetic polynucleotide
atcatctcaccttgcctcctgataggagggtctaaggccctgcagggtgaactcgttgacccagagtgaactcgttgaccctcggtgaactcgttgacccgacgtgaactcgttgacccctagtgaactcgttgacccactgtgaactcgttgaccctgcggcgcgccatgcttcatcagactct

SEQ ID NO: 4143 - DNA, 185 bp, Artificial Sequence; identical to SEQ ID NO: 4142
  Synthetic polynucleotide

SEQ ID NO: 4144 - DNA, 197 bp, Artificial Sequence
  Synthetic polynucleotide
atcatctcaccttgcctcctgggcacggtaacttgcctcctgcaggcatgcccatataaggcaaagacatgcccatataaggcaatcgcatgcccatataaggcaagaccatgcccatataaggcaactacatgcccatataaggcaaactcatgcccatataaggcaatgcggcgcgccatgcttcatcagactct

SEQ ID NO: 4145 - DNA, 197 bp, Artificial Sequence; identical to SEQ ID NO: 4144
  Synthetic polynucleotide

SEQ ID NO: 4146 - DNA, 197 bp, Artificial Sequence
  Synthetic polynucleotide
atcatctcaccttgcctcctgggattgccttgcctggtcctgcaggcaagatggcggcggcagacaagatggcggcggctcgcaagatggcggcggcgaccaagatggcggcggcctacaagatggcggcggcactcaagatggcggcggctgccaagatggcggcggcgtaggcgcgccatgcttcatcagactct

SEQ ID NO: 4147 - DNA, 197 bp, Artificial Sequence; identical to SEQ ID NO: 4146
  Synthetic polynucleotide

SEQ ID NO: 4148 - DNA, 164 bp, Artificial Sequence
  Synthetic polynucleotide
atcatctcaccttgcctcctgccaccggttcatgtacacctgcagggtcacgtacagagtcacgtactcggtcacgtacgacgtcacgtacctagtcacgtacactgtcacgtactgcgtcacgtacgtagtcacgtacggcgcgccatgcttcatcagactct

SEQ ID NO: 4149 - DNA, 164 bp, Artificial Sequence; identical to SEQ ID NO: 4148
  Synthetic polynucleotide

SEQ ID NO: 4150 - DNA, 190 bp, Artificial Sequence
  Synthetic polynucleotide
atcatctcaccttgcctcctgtagcttctttcacatagcctgcagggggtcacgtgtccaagagggtcacgtgtccatcggggtcacgtgtccagacgggtcacgtgtccactagggtcacgtgtccaactgggtcacgtgtccatgcgggtcacgtgtccagtaggcgcgccatgcttcatcagactct

SEQ ID NO: 4151 - DNA, 190 bp, Artificial Sequence; identical to SEQ ID NO: 4150
  Synthetic polynucleotide

SEQ ID NO: 4152 - DNA, 156 bp, Artificial Sequence
  Synthetic polynucleotide
atcatctcaccttgcctcctgggagcatgatacctggacctgcaggagaaaaatagaagaaaaattcgagaaaaatgacagaaaaatctaagaaaaatactagaaaaattgcagaaaaatgtaagaaaaatggcgcgccatgcttcatcagactct

SEQ ID NO: 4153 - DNA, 156 bp, Artificial Sequence; identical to SEQ ID NO: 4152
  Synthetic polynucleotide

SEQ ID NO: 4154 - DNA, 196 bp, Artificial Sequence
  Synthetic polynucleotide
atcatctcaccttgcctcctgcgcagtgagttacttggcctgcaggtgattggctaaggagatgattggctaaggtcgtgattggctaagggactgattggctaaggctatgattggctaaggacttgattggctaaggtgctgattggctaagggtatgattggctaaggggcgcgccatgcttcatcagactct

SEQ ID NO: 4155 - DNA, 196 bp, Artificial Sequence; identical to SEQ ID NO: 4154
  Synthetic polynucleotide

SEQ ID NO: 4156 - DNA, 180 bp, Artificial Sequence
  Synthetic polynucleotide
atcatctcaccttgcctcctgtctcgatgggtagaaaccctgcaggataacggtactagaataacggtacttcgataacggtactgacataacggtactctaataacggtactactataacggtacttgcataacggtactgtaataacggtactggcgcgccatgcttcatcagactct

SEQ ID NO: 4157 - DNA, 180 bp, Artificial Sequence; identical to SEQ ID NO: 4156
  Synthetic polynucleotide

SEQ ID NO: 4158 - DNA, 180 bp, Artificial Sequence
  Synthetic polynucleotide
atcatctcaccttgcctcctgcttcaagctgatcctttcctgcagggcaggaaatgaagagcaggaaatgatcggcaggaaatgagacgcaggaaatgactagcaggaaatgaactgcaggaaatgatgcgcaggaaatgagtagcaggaaatgaggcgcgccatgcttcatcagactct

SEQ ID NO: 4159 - DNA, 180 bp, Artificial Sequence; identical to SEQ ID NO: 4158
  Synthetic polynucleotide

SEQ ID NO: 4160 - DNA, 172 bp, Artificial Sequence
  Synthetic polynucleotide
atcatctcaccttgcctcctgctcactccgttattaatcctgcaggagctcattatagaagctcattattcgagctcattatgacagctcattatctaagctcattatactagctcattattgcagctcattatgtaagctcattatggcgcgccatgcttcatcagactct

SEQ ID NO: 4161 - DNA, 172 bp, Artificial Sequence; identical to SEQ ID NO: 4160
  Synthetic polynucleotide

SEQ ID NO: 4162 - DNA, 188 bp, Artificial Sequence
  Synthetic polynucleotide
atcatctcaccttgcctcctgccctgtcctctgtgtgacctgcaggaccgttaacggtagaaccgttaacggttcgaccgttaacggtgacaccgttaacggtctaaccgttaacggtactaccgttaacggttgcaccgttaacggtgtaaccgttaacggtggcgcgccatgcttcatcagactct

SEQ ID NO: 4163 - DNA, 188 bp, Artificial Sequence; identical to SEQ ID NO: 4162
  Synthetic polynucleotide

SEQ ID NO: 4164 - DNA, 191 bp, Artificial Sequence
  Synthetic polynucleotide
atcatctcaccttgcctcctggttctacactccctgatcctgcagggagaagggggcgggaccagagagaagggggcgggacctcggagaagggggcgggaccgacgagaagggggcgggaccctagagaagggggcgggaccactgagaagggggcgggacctgcggcgcgccatgcttcatcagactct

SEQ ID NO: 4165 - DNA, 191 bp, Artificial Sequence; identical to SEQ ID NO: 4164
  Synthetic polynucleotide

SEQ ID NO: 4166 - DNA, 196 bp, Artificial Sequence
  Synthetic polynucleotide
atcatctcaccttgcctcctgcgaggttctttcacttccctgcaggggcgcaatgcattgtgggtaaaagaggcgcaatgcattgtgggtaaatcgggcgcaatgcattgtgggtaaagacggcgcaatgcattgtgggtaaactaggcgcaatgcattgtgggtaaaactggcgcgccatgcttcatcagactct

SEQ ID NO: 4167 - DNA, 196 bp, Artificial Sequence; identical to SEQ ID NO: 4166
  Synthetic polynucleotide

SEQ ID NO: 4168 - DNA, 179 bp, Artificial Sequence
  Synthetic polynucleotide
atcatctcaccttgcctcctgcattctttgtaggtgcacctgcaggctctaggaaacgcaattctgggaaagactctaggaaacgcaattctgggaatcgctctaggaaacgcaattctgggaagacctctaggaaacgcaattctgggaactaggcgcgccatgcttcatcagactct

SEQ ID NO: 4169 - DNA, 179 bp, Artificial Sequence; identical to SEQ ID NO: 4168
  Synthetic polynucleotide

SEQ ID NO: 4170 - DNA, 197 bp, Artificial Sequence
  Synthetic polynucleotide
atcatctcaccttgcctcctggatagaaagtggaagaccctgcaggagaacatcatgtactagaagaacatcatgtacttcgagaacatcatgtactgacagaacatcatgtactctaagaacatcatgtactactagaacatcatgtacttgcagaacatcatgtactgtaggcgcgccatgcttcatcagactct

SEQ ID NO: 4171 - DNA, 197 bp, Artificial Sequence; identical to SEQ ID NO: 4170
  Synthetic polynucleotide

SEQ ID NO: 4172 - DNA, 140 bp, Artificial Sequence
  Synthetic polynucleotide
atcatctcaccttgcctcctgcacgatcaaggacatttcctgcaggagtccaagaagtccatcgagtccagacagtccactaagtccaactagtccatgcagtccagtaagtccaggcgcgccatgcttcatcagactct

SEQ ID NO: 4173 - DNA, 140 bp, Artificial Sequence; identical to SEQ ID NO: 4172
  Synthetic polynucleotide

SEQ ID NO: 4174 - DNA, 196 bp, Artificial Sequence
  Synthetic polynucleotide
atcatctcaccttgcctcctggttaggcaccaagcgaacctgcaggacgtcagcaatttagaacgtcagcaattttcgacgtcagcaatttgacacgtcagcaatttctaacgtcagcaatttactacgtcagcaattttgcacgtcagcaatttgtaacgtcagcaatttggcgcgccatgcttcatcagactct

SEQ ID NO: 4175 - DNA, 196 bp, Artificial Sequence; identical to SEQ ID NO: 4174
  Synthetic polynucleotide

SEQ ID NO: 4176 - DNA, 180 bp, Artificial Sequence
  Synthetic polynucleotide
atcatctcaccttgcctcctgtatacagcaagggctggcctgcaggctcacgtgcacagactcacgtgcactcgctcacgtgcacgacctcacgtgcacctactcacgtgcacactctcacgtgcactgcctcacgtgcacgtactcacgtgcacggcgcgccatgcttcatcagactct

SEQ ID NO: 4177 - DNA, 180 bp, Artificial Sequence; identical to SEQ ID NO: 4176
  Synthetic polynucleotide

SEQ ID NO: 4178 - DNA, 148 bp, Artificial Sequence
  Synthetic polynucleotide
atcatctcaccttgcctcctgtcagtctgccgagggatcctgcaggtggaaaaagatggaaaatcgtggaaaagactggaaaactatggaaaaacttggaaaatgctggaaaagtatggaaaaggcgcgccatgcttcatcagactct

SEQ ID NO: 4179 - DNA, 148 bp, Artificial Sequence; identical to SEQ ID NO: 4178
  Synthetic polynucleotide

SEQ ID NO: 4180 - DNA, 200 bp, Artificial Sequence
  Synthetic polynucleotide
atcatctcaccttgcctcctgcccaccgtatctgagaccctgcagggcggacgttgaacgtccgcagagcggacgttgaacgtccgctcggcggacgttgaacgtccgcgacgcggacgttgaacgtccgcctagcggacgttgaacgtccgcactgcggacgttgaacgtccgcggcgcgccatgcttcatcagactct

SEQ ID NO: 4181 - DNA, 200 bp, Artificial Sequence; identical to SEQ ID NO: 4180
  Synthetic polynucleotide

SEQ ID NO: 4182 - DNA, 185 bp, Artificial Sequence
  Synthetic polynucleotide
atcatctcaccttgcctcctgtctcctagggttaatgacctgcagggaggtcaaaaggtcaaagagaggtcaaaaggtcaatcggaggtcaaaaggtcaagacgaggtcaaaaggtcaactagaggtcaaaaggtcaaactgaggtcaaaaggtcaatgcggcgcgccatgcttcatcagactct

SEQ ID NO: 4183 - DNA, 185 bp, Artificial Sequence; identical to SEQ ID NO: 4182
  Synthetic polynucleotide

SEQ ID NO: 4184 - DNA, 185 bp, Artificial Sequence
  Synthetic polynucleotide
atcatctcaccttgcctcctggcctgttaaacctctcacctgcagggaggtcaaaaggtcacagagaggtcaaaaggtcactcggaggtcaaaaggtcacgacgaggtcaaaaggtcacctagaggtcaaaaggtcacactgaggtcaaaaggtcactgcggcgcgccatgcttcatcagactct

SEQ ID NO: 4185 - DNA, 185 bp, Artificial Sequence; identical to SEQ ID NO: 4184
  Synthetic polynucleotide

SEQ ID NO: 4186 - DNA, 172 bp, Artificial Sequence
  Synthetic polynucleotide
atcatctcaccttgcctcctggcttactacctctagtccctgcaggaatgactcatagaaatgactcattcgaatgactcatgacaatgactcatctaaatgactcatactaatgactcattgcaatgactcatgtaaatgactcatggcgcgccatgcttcatcagactct

SEQ ID NO: 4187 - DNA, 172 bp, Artificial Sequence; identical to SEQ ID NO: 4186
  Synthetic polynucleotide

SEQ ID NO: 4188 - DNA, 172 bp, Artificial Sequence
  Synthetic polynucleotide
atcatctcaccttgcctcctgtgcgcgtctatgcgtgtcctgcaggtgacccggaaagatgacccggaatcgtgacccggaagactgacccggaactatgacccggaaacttgacccggaatgctgacccggaagtatgacccggaaggcgcgccatgcttcatcagactct

SEQ ID NO: 4189 - DNA, 172 bp, Artificial Sequence; identical to SEQ ID NO: 4188
  Synthetic polynucleotide

SEQ ID NO: 4190 - DNA, 197 bp, Artificial Sequence
  Synthetic polynucleotide
atcatctcaccttgcctcctgaaaggcatctgaagcgccctgcaggcatgccctggggccaagacatgccctggggccatcgcatgccctggggccagaccatgccctggggccactacatgccctggggccaactcatgccctggggccatgccatgccctggggccagtaggcgcgccatgcttcatcagactct

SEQ ID NO: 4191 - DNA, 197 bp, Artificial Sequence; identical to SEQ ID NO: 4190
  Synthetic polynucleotide

SEQ ID NO: 4192 - DNA, 197 bp, Artificial Sequence
  Synthetic polynucleotide
atcatctcaccttgcctcctgagcaggtgtgtcggtaacctgcagggtggggcagccacctagagtggggcagccaccttcggtggggcagccacctgacgtggggcagccacctctagtggggcagccacctactgtggggcagccaccttgcgtggggcagccacctgtaggcgcgccatgcttcatcagactct

SEQ ID NO: 4193 - DNA, 197 bp, Artificial Sequence; identical to SEQ ID NO: 4192
  Synthetic polynucleotide

SEQ ID NO: 4194 - DNA, 179 bp, Artificial Sequence
  Synthetic polynucleotide
atcatctcaccttgcctcctgctcagttgatgcggcttcctgcaggtttttatcacctaattctctacctagatttttatcacctaattctctaccttcgtttttatcacctaattctctacctgactttttatcacctaattctctacctctaggcgcgccatgcttcatcagactct

SEQ ID NO: 4195 - DNA, 179 bp, Artificial Sequence; identical to SEQ ID NO: 4194
  Synthetic polynucleotide

SEQ ID NO: 4196 - DNA, 190 bp, Artificial Sequence
  Synthetic polynucleotide
atcatctcaccttgcctcctgggaatagcaaacgtgatcctgcaggtacgtggttacgttagatacgtggttacgtttcgtacgtggttacgttgactacgtggttacgttctatacgtggttacgttacttacgtggttacgtttgctacgtggttacgttgtaggcgcgccatgcttcatcagactct

SEQ ID NO: 4197 - DNA, 190 bp, Artificial Sequence; identical to SEQ ID NO: 4196
  Synthetic polynucleotide

SEQ ID NO: 4198 - DNA, 140 bp, Artificial Sequence
  Synthetic polynucleotide
atcatctcaccttgcctcctgtaacttcaggtctactccctgcaggatgacgagaatgacgtcgatgacggacatgacgctaatgacgactatgacgtgcatgacggtaatgacgggcgcgccatgcttcatcagactct

SEQ ID NO: 4199 - DNA, 140 bp, Artificial Sequence; identical to SEQ ID NO: 4198
  Synthetic polynucleotide

SEQ ID NO: 4200 - DNA, 172 bp, Artificial Sequence
  Synthetic polynucleotide
atcatctcaccttgcctcctgagctcgccctctgatgtcctgcaggcgcgcgtggcagacgcgcgtggctcgcgcgcgtggcgaccgcgcgtggcctacgcgcgtggcactcgcgcgtggctgccgcgcgtggcgtacgcgcgtggcggcgcgccatgcttcatcagactct

SEQ ID NO: 4201 - DNA, 172 bp, Artificial Sequence; identical to SEQ ID NO: 4200
  Synthetic polynucleotide

SEQ ID NO: 4202 - DNA, 156 bp, Artificial Sequence
  Synthetic polynucleotide
atcatctcaccttgcctcctggaatatgcgtagcgcgccctgcagggttgctatagagttgctattcggttgctatgacgttgctatctagttgctatactgttgctattgcgttgctatgtagttgctatggcgcgccatgcttcatcagactct

SEQ ID NO: 4203 - DNA, 156 bp, Artificial Sequence; identical to SEQ ID NO: 4202
  Synthetic polynucleotide

SEQ ID NO: 4204 - DNA, 191 bp, Artificial Sequence
  Synthetic polynucleotide
atcatctcaccttgcctcctggtcctactcaccatggccctgcaggttcatactggagagaaaagattcatactggagagaaatcgttcatactggagagaaagacttcatactggagagaaactattcatactggagagaaaactttcatactggagagaaatgcggcgcgccatgcttcatcagactct

SEQ ID NO: 4205 - DNA, 191 bp, Artificial Sequence; identical to SEQ ID NO: 4204
  Synthetic polynucleotide

SEQ ID NO: 4206 - DNA, 172 bp, Artificial Sequence
  Synthetic polynucleotide
atcatctcaccttgcctcctgacctgtagactactggccctgcaggcaataaacaaagacaataaacaatcgcaataaacaagaccaataaacaactacaataaacaaactcaataaacaatgccaataaacaagtacaataaacaaggcgcgccatgcttcatcagactct

SEQ ID NO: 4207 - DNA, 172 bp, Artificial Sequence; identical to SEQ ID NO: 4206
  Synthetic polynucleotide

SEQ ID NO: 4208 - DNA, 190 bp, Artificial Sequence
  Synthetic polynucleotide
atcatctcaccttgcctcctgcggtacataccctctcacctgcaggtgctgagtcatgctagatgctgagtcatgcttcgtgctgagtcatgctgactgctgagtcatgctctatgctgagtcatgctacttgctgagtcatgcttgctgctgagtcatgctgtaggcgcgccatgcttcatcagactct

SEQ ID NO: 4209 - DNA, 190 bp, Artificial Sequence; identical to SEQ ID NO: 4208
  Synthetic polynucleotide

SEQ ID NO: 4210 - DNA, 172 bp, Artificial Sequence
  Synthetic polynucleotide
atcatctcaccttgcctcctgggcctcataagagtcggcctgcaggaacaggtggtagaaacaggtggttcgaacaggtggtgacaacaggtggtctaaacaggtggtactaacaggtggttgcaacaggtggtgtaaacaggtggtggcgcgccatgcttcatcagactct

SEQ ID NO: 4211 - DNA, 172 bp, Artificial Sequence; identical to SEQ ID NO: 4210
  Synthetic polynucleotide

SEQ ID NO: 4212 - DNA, 188 bp, Artificial Sequence
  Synthetic polynucleotide
atcatctcaccttgcctcctggataacgttacgcaagacctgcaggtaatccaattatagataatccaattattcgtaatccaattatgactaatccaattatctataatccaattatacttaatccaattattgctaatccaattatgtataatccaattatggcgcgccatgcttcatcagactct

SEQ ID NO: 4213 - DNA, 188 bp, Artificial Sequence; identical to SEQ ID NO: 4212
  Synthetic polynucleotide

SEQ ID NO: 4214 - DNA, 164 bp, Artificial Sequence
  Synthetic polynucleotide
atcatctcaccttgcctcctgagatctaagtatatgcgcctgcaggcagcaccttagacagcacctttcgcagcaccttgaccagcaccttctacagcaccttactcagcacctttgccagcaccttgtacagcaccttggcgcgccatgcttcatcagactct

SEQ ID NO: 4215 - DNA, 164 bp, Artificial Sequence; identical to SEQ ID NO: 4214
  Synthetic polynucleotide

SEQ ID NO: 4216 - DNA, 197 bp, Artificial Sequence
  Synthetic polynucleotide
atcatctcaccttgcctcctggtatgggtttaaccgaacctgcagggccaccagggggcgcagagccaccagggggcgctcggccaccagggggcgcgacgccaccagggggcgcctagccaccagggggcgcactgccaccagggggcgctgcgccaccagggggcgcgtaggcgcgccatgcttcatcagactct

SEQ ID NO: 4217 - DNA, 197 bp, Artificial Sequence; identical to SEQ ID NO: 4216
  Synthetic polynucleotide

SEQ ID NO: 4218 - DNA, 172 bp, Artificial Sequence
  Synthetic polynucleotide
atcatctcaccttgcctcctgaggccggatctgatattcctgcaggtattaataatagatattaataattcgtattaataatgactattaataatctatattaataatacttattaataattgctattaataatgtatattaataatggcgcgccatgcttcatcagactct

SEQ ID NO: 4219 - DNA, 172 bp, Artificial Sequence; identical to SEQ ID NO: 4218
  Synthetic polynucleotide

SEQ ID NO: 4220 - DNA, 156 bp, Artificial Sequence
  Synthetic polynucleotide
atcatctcaccttgcctcctggttagaagacagctatccctgcaggtttggcggagatttggcggtcgtttggcgggactttggcggctatttggcggacttttggcggtgctttggcgggtatttggcggggcgcgccatgcttcatcagactct

SEQ ID NO: 4221 - DNA, 156 bp, Artificial Sequence; identical to SEQ ID NO: 4220
  Synthetic polynucleotide

SEQ ID NO: 4222 - DNA, 185 bp, Artificial Sequence
  Synthetic polynucleotide
atcatctcaccttgcctcctgcttacctgcaactcggccctgcaggaaggagctgtcaatacagaaaggagctgtcaatactcgaaggagctgtcaatacgacaaggagctgtcaatacctaaaggagctgtcaatacactaaggagctgtcaatactgcggcgcgccatgcttcatcagactct

SEQ ID NO: 4223 - DNA, 185 bp, Artificial Sequence; identical to SEQ ID NO: 4222
  Synthetic polynucleotide

SEQ ID NO: 4224 - DNA, 148 bp, Artificial Sequence
  Synthetic polynucleotide
atcatctcaccttgcctcctggttgagttcgagcaactcctgcaggcataaatagacataaattcgcataaatgaccataaatctacataaatactcataaattgccataaatgtacataaatggcgcgccatgcttcatcagactct

SEQ ID NO: 4225 - DNA, 148 bp, Artificial Sequence; identical to SEQ ID NO: 4224
  Synthetic polynucleotide

SEQ ID NO: 4226 - DNA, 200 bp, Artificial Sequence
  Synthetic polynucleotide
atcatctcaccttgcctcctgcgcaagatgagagtcgtcctgcaggtccatcatgcgtgacgaggagatccatcatgcgtgacgaggtcgtccatcatgcgtgacgagggactccatcatgcgtgacgaggctatccatcatgcgtgacgaggacttccatcatgcgtgacgaggggcgcgccatgcttcatcagactct

SEQ ID NO: 4227 - DNA, 200 bp, Artificial Sequence; identical to SEQ ID NO: 4226
  Synthetic polynucleotide

SEQ ID NO: 4228 - DNA, 196 bp, Artificial Sequence
  Synthetic polynucleotide
atcatctcaccttgcctcctgattaatgggtcctactgcctgcaggactgttactaaaaatagaaactagaactgttactaaaaatagaaacttcgactgttactaaaaatagaaactgacactgttactaaaaatagaaactctaactgttactaaaaatagaaactactggcgcgccatgcttcatcagactct

SEQ ID NO: 4229 - DNA, 196 bp, Artificial Sequence; identical to SEQ ID NO: 4228
  Synthetic polynucleotide

SEQ ID NO: 4230 - DNA, 140 bp, Artificial Sequence
  Synthetic polynucleotide
atcatctcaccttgcctcctgagccgctgtactgacgacctgcaggaccacaagaaccacatcgaccacagacaccacactaaccacaactaccacatgcaccacagtaaccacaggcgcgccatgcttcatcagactct

SEQ ID NO: 4231 - DNA, 140 bp, Artificial Sequence; identical to SEQ ID NO: 4230
  Synthetic polynucleotide

SEQ ID NO: 4232 - DNA, 197 bp, Artificial Sequence
  Synthetic polynucleotide
atcatctcaccttgcctcctgatgaagtgcaacaactacctgcaggacatgcccagacatgagaacatgcccagacatgtcgacatgcccagacatggacacatgcccagacatgctaacatgcccagacatgactacatgcccagacatgtgcacatgcccagacatggtaggcgcgccatgcttcatcagactct

SEQ ID NO: 4233 - DNA, 197 bp, Artificial Sequence; identical to SEQ ID NO: 4232
  Synthetic polynucleotide

SEQ ID NO: 4234 - DNA, 185 bp, Artificial Sequence
  Synthetic polynucleotide
atcatctcaccttgcctcctgacggtccaaactcctgccctgcaggtaaagtcgtaaaatagagataaagtcgtaaaatagtcgtaaagtcgtaaaataggactaaagtcgtaaaatagctataaagtcgtaaaatagacttaaagtcgtaaaatagtgcggcgcgccatgcttcatcagactct

SEQ ID NO: 4235 - DNA, 185 bp, Artificial Sequence; identical to SEQ ID NO: 4234
  Synthetic polynucleotide

SEQ ID NO: 4236 - DNA, 156 bp, Artificial Sequence
  Synthetic polynucleotide
atcatctcaccttgcctcctgaccgacgagcaataccccctgcaggcttgtaatagacttgtaattcgcttgtaatgaccttgtaatctacttgtaatactcttgtaattgccttgtaatgtacttgtaatggcgcgccatgcttcatcagactct

SEQ ID NO: 4237 - DNA, 156 bp, Artificial Sequence; identical to SEQ ID NO: 4236
  Synthetic polynucleotide

SEQ ID NO: 4238 - DNA, 188 bp, Artificial Sequence
  Synthetic polynucleotide
atcatctcaccttgcctcctgttccgcaacgtgctcaacctgcaggagggctatttttagaagggctattttttcgagggctatttttgacagggctatttttctaagggctatttttactagggctattttttgcagggctatttttgtaagggctatttttggcgcgccatgcttcatcagactct

SEQ ID NO: 4239 - DNA, 188 bp, Artificial Sequence; identical to SEQ ID NO: 4238
  Synthetic polynucleotide

SEQ ID NO: 4240 - DNA, 156 bp, Artificial Sequence
  Synthetic polynucleotide
atcatctcaccttgcctcctgcgccgcattgcctacatcctgcaggtttggcgcagatttggcgctcgtttggcgcgactttggcgcctatttggcgcacttttggcgctgctttggcgcgtatttggcgcggcgcgccatgcttcatcagactct

SEQ ID NO: 4241 - DNA, 156 bp, Artificial Sequence; identical to SEQ ID NO: 4240
  Synthetic polynucleotide

SEQ ID NO: 4242 - DNA, 191 bp, Artificial Sequence
  Synthetic polynucleotide
atcatctcaccttgcctcctgcatgatggcggtcacgacctgcaggtattcaaggtcatgcgaagatattcaaggtcatgcgatcgtattcaaggtcatgcgagactattcaaggtcatgcgactatattcaaggtcatgcgaacttattcaaggtcatgcgatgcggcgcgccatgcttcatcagactct

SEQ ID NO: 4243 - DNA, 191 bp, Artificial Sequence; identical to SEQ ID NO: 4242
  Synthetic polynucleotide

SEQ ID NO: 4244 - DNA, 172 bp, Artificial Sequence
  Synthetic polynucleotide
atcatctcaccttgcctcctggcttggagcacaatggccctgcaggtgctttaattagatgctttaatttcgtgctttaattgactgctttaattctatgctttaattacttgctttaatttgctgctttaattgtatgctttaattggcgcgccatgcttcatcagactct

SEQ ID NO: 4245 - DNA, 172 bp, Artificial Sequence; identical to SEQ ID NO: 4244
  Synthetic polynucleotide

SEQ ID NO: 4246 - DNA, 164 bp, Artificial Sequence
  Synthetic polynucleotide
atcatctcaccttgcctcctggagatgtgatgcagttgcctgcaggaagtcacgtagaaagtcacgttcgaagtcacgtgacaagtcacgtctaaagtcacgtactaagtcacgttgcaagtcacgtgtaaagtcacgtggcgcgccatgcttcatcagactct

SEQ ID NO: 4247 - DNA, 164 bp, Artificial Sequence; identical to SEQ ID NO: 4246
  Synthetic polynucleotide

SEQ ID NO: 4248 - DNA, 200 bp, Artificial Sequence
  Synthetic polynucleotide
atcatctcaccttgcctcctgtccgcgaattgacgcgtcctgcaggtcacggttgattgcttttgagatcacggttgattgcttttgtcgtcacggttgattgcttttggactcacggttgattgcttttgctatcacggttgattgcttttgacttcacggttgattgcttttgggcgcgccatgcttcatcagactct

SEQ ID NO: 4249 - DNA, 200 bp, Artificial Sequence; identical to SEQ ID NO: 4248
  Synthetic polynucleotide

SEQ ID NO: 4250 - DNA, 172 bp, Artificial Sequence
  Synthetic polynucleotide
atcatctcaccttgcctcctgtcgttaaccaaacaacgcctgcaggctaattacgcagactaattacgctcgctaattacgcgacctaattacgcctactaattacgcactctaattacgctgcctaattacgcgtactaattacgcggcgcgccatgcttcatcagactct

SEQ ID NO: 4251 - DNA, 172 bp, Artificial Sequence; identical to SEQ ID NO: 4250
  Synthetic polynucleotide

SEQ ID NO: 4252 - DNA, 196 bp, Artificial Sequence
  Synthetic polynucleotide
atcatctcaccttgcctcctgatcagaatcgaatcggacctgcaggggggattgcatctagaggggattgcatcttcgggggattgcatctgacggggattgcatctctaggggattgcatctactggggattgcatcttgcggggattgcatctgtaggggattgcatctggcgcgccatgcttcatcagactct

SEQ ID NO: 4253 - DNA, 196 bp, Artificial Sequence; identical to SEQ ID NO: 4252
  Synthetic polynucleotide

SEQ ID NO: 4254 - DNA, 172 bp, Artificial Sequence
  Synthetic polynucleotide
atcatctcaccttgcctcctgattccaaacgctttcgccctgcaggaaccttatatagaaaccttatattcgaaccttatatgacaaccttatatctaaaccttatatactaaccttatattgcaaccttatatgtaaaccttatatggcgcgccatgcttcatcagactct

SEQ ID NO: 4255 - DNA, 172 bp, Artificial Sequence; identical to SEQ ID NO: 4254
  Synthetic polynucleotide

SEQ ID NO: 4256 - DNA, 197 bp, Artificial Sequence
  Synthetic polynucleotide
atcatctcaccttgcctcctgcaagcatactcgatccccctgcaggtctcacgctagccgggggagatctcacgctagccgggggtcgtctcacgctagccggggggactctcacgctagccgggggctatctcacgctagccgggggacttctcacgctagccgggggtgcggcgcgccatgcttcatcagactct

SEQ ID NO: 4257 - DNA, 197 bp, Artificial Sequence; identical to SEQ ID NO: 4256
  Synthetic polynucleotide

SEQ ID NO: 4258 - DNA, 185 bp, Artificial Sequence
  Synthetic polynucleotide
atcatctcaccttgcctcctgccgtgattgaacgcgttcctgcaggaaattttacgaggtttagaaaattttacgaggttttcgaaattttacgaggtttgacaaattttacgaggtttctaaaattttacgaggtttactaaattttacgaggttttgcggcgcgccatgcttcatcagactct

SEQ ID NO: 4259 - DNA, 185 bp, Artificial Sequence; identical to SEQ ID NO: 4258
  Synthetic polynucleotide

SEQ ID NO: 4260 - DNA, 180 bp, Artificial Sequence
  Synthetic polynucleotide
atcatctcaccttgcctcctgtagcttgcttgtgtaagcctgcaggaatgtatcaatagaaatgtatcaattcgaatgtatcaatgacaatgtatcaatctaaatgtatcaatactaatgtatcaattgcaatgtatcaatgtaaatgtatcaatggcgcgccatgcttcatcagactct

SEQ ID NO: 4261 - DNA, 180 bp, Artificial Sequence; identical to SEQ ID NO: 4260
  Synthetic polynucleotide

SEQ ID NO: 4262 - DNA, 191 bp, Artificial Sequence
  Synthetic polynucleotide
atcatctcaccttgcctcctgcatacatacattcgacgcctgcagggaacaccatttttgaacagagaacaccatttttgaactcggaacaccatttttgaacgacgaacaccatttttgaacctagaacaccatttttgaacactgaacaccatttttgaactgcggcgcgccatgcttcatcagactct

SEQ ID NO: 4263 - DNA, 191 bp, Artificial Sequence; identical to SEQ ID NO: 4262
  Synthetic polynucleotide

SEQ ID NO: 4264 - DNA, 191 bp, Artificial Sequence
  Synthetic polynucleotide
atcatctcaccttgcctcctgctttcgccacagtctctcctgcaggtgaccttgaatgaccttagatgaccttgaatgacctttcgtgaccttgaatgaccttgactgaccttgaatgaccttctatgaccttgaatgaccttacttgaccttgaatgacctttgcggcgcgccatgcttcatcagactct

SEQ ID NO: 4265 - DNA, 191 bp, Artificial Sequence; identical to SEQ ID NO: 4264
  Synthetic polynucleotide

SEQ ID NO: 4266 - DNA, 191 bp, Artificial Sequence
  Synthetic polynucleotide
atcatctcaccttgcctcctgctgcgtatgccgtttcccctgcaggaccttaaccgtgacgaaatttagaaccttaaccgtgacgaaattttcgaccttaaccgtgacgaaatttgacaccttaaccgtgacgaaatttctaaccttaaccgtgacgaaatttactggcgcgccatgcttcatcagactct

SEQ ID NO: 4267 - DNA, 191 bp, Artificial Sequence; identical to SEQ ID NO: 4266
  Synthetic polynucleotide

SEQ ID NO: 4268 - DNA, 180 bp, Artificial Sequence
  Synthetic polynucleotide
atcatctcaccttgcctcctgtggattcccacgcatgacctgcaggcagacggacacagacagacggacactcgcagacggacacgaccagacggacacctacagacggacacactcagacggacactgccagacggacacgtacagacggacacggcgcgccatgcttcatcagactct

SEQ ID NO: 4269 - DNA, 180 bp, Artificial Sequence; identical to SEQ ID NO: 4268
  Synthetic polynucleotide

SEQ ID NO: 4270 - DNA, 191 bp, Artificial Sequence
  Synthetic polynucleotide
atcatctcaccttgcctcctggtctgagtatatgcaatcctgcagggccagaaccggtttgaaccggagagccagaaccggtttgaaccggtcggccagaaccggtttgaaccgggacgccagaaccggtttgaaccggctagccagaaccggtttgaaccggactggcgcgccatgcttcatcagactct

SEQ ID NO: 4271 - DNA, 191 bp, Artificial Sequence; identical to SEQ ID NO: 4270
  Synthetic polynucleotide

SEQ ID NO: 4272 - DNA, 197 bp, Artificial Sequence
  Synthetic polynucleotide
atcatctcaccttgcctcctgatgcttacttcatagaccctgcagggccaccagggggcgctatagagccaccagggggcgctattcggccaccagggggcgctatgacgccaccagggggcgctatctagccaccagggggcgctatactgccaccagggggcgctattgcggcgcgccatgcttcatcagactct

SEQ ID NO: 4273 - DNA, 197 bp, Artificial Sequence; identical to SEQ ID NO: 4272
  Synthetic polynucleotide

SEQ ID NO: 4274 - DNA, 191 bp, Artificial Sequence
  Synthetic polynucleotide
atcatctcaccttgcctcctgcagccactgttcactgccctgcaggtagtagcctggcaacaaagatagtagcctggcaacaatcgtagtagcctggcaacaagactagtagcctggcaacaactatagtagcctggcaacaaacttagtagcctggcaacaatgcggcgcgccatgcttcatcagactct

SEQ ID NO: 4275 - DNA, 191 bp, Artificial Sequence; identical to SEQ ID NO: 4274
  Synthetic polynucleotide

SEQ ID NO: 4276 - DNA, 191 bp, Artificial Sequence
  Synthetic polynucleotide
atcatctcaccttgcctcctgtacctaacaggctaatacctgcagggccaccagggggcgccaagagccaccagggggcgccatcggccaccagggggcgccagacgccaccagggggcgccactagccaccagggggcgccaactgccaccagggggcgccatgcggcgcgccatgcttcatcagactct

SEQ ID NO: 4277 - DNA, 191 bp, Artificial Sequence; identical to SEQ ID NO: 4276
  Synthetic polynucleotide

SEQ ID NO: 4278 - DNA, 185 bp, Artificial Sequence
  Synthetic polynucleotide
atcatctcaccttgcctcctggagatgtggttgcacggcctgcaggaccggcaattaataaaagaaccggcaattaataaatcgaccggcaattaataaagacaccggcaattaataaactaaccggcaattaataaaactaccggcaattaataaatgcggcgcgccatgcttcatcagactct

SEQ ID NO: 4279 - DNA, 185 bp, Artificial Sequence; identical to SEQ ID NO: 4278
  Synthetic polynucleotide

SEQ ID NO: 4280 - DNA, 185 bp, Artificial Sequence
  Synthetic polynucleotide
atcatctcaccttgcctcctgtcaaggaggttcgtcatcctgcaggaaattaattgattttgagaaaattaattgattttgtcgaaattaattgattttggacaaattaattgattttgctaaaattaattgattttgactaaattaattgattttgtgcggcgcgccatgcttcatcagactct

SEQ ID NO: 4281 - DNA, 185 bp, Artificial Sequence; identical to SEQ ID NO: 4280
  Synthetic polynucleotide

SEQ ID NO: 4282 - DNA, 140 bp, Artificial Sequence
  Synthetic polynucleotide
atcatctcaccttgcctcctgagcaactcctgagcggacctgcaggagttcaagaagttcatcgagttcagacagttcactaagttcaactagttcatgcagttcagtaagttcaggcgcgccatgcttcatcagactct

SEQ ID NO: 4283 - DNA, 140 bp, Artificial Sequence; identical to SEQ ID NO: 4282
  Synthetic polynucleotide

SEQ ID NO: 4284 - DNA, 190 bp, Artificial Sequence
  Synthetic polynucleotide
atcatctcaccttgcctcctggttcctatttgataggccctgcaggccccgcccacgcacagaccccgcccacgcactcgccccgcccacgcacgacccccgcccacgcacctaccccgcccacgcacactccccgcccacgcactgcccccgcccacgcacgtaggcgcgccatgcttcatcagactct

SEQ ID NO: 4285 - DNA, 190 bp, Artificial Sequence; identical to SEQ ID NO: 4284
  Synthetic polynucleotide

SEQ ID NO: 4286 - DNA, 164 bp, Artificial Sequence
  Synthetic polynucleotide
atcatctcaccttgcctcctggtagtggcgaccaatagcctgcagggcagctggtagagcagctggttcggcagctggtgacgcagctggtctagcagctggtactgcagctggttgcgcagctggtgtagcagctggtggcgcgccatgcttcatcagactct

SEQ ID NO: 4287 - DNA, 164 bp, Artificial Sequence; identical to SEQ ID NO: 4286
  Synthetic polynucleotide

SEQ ID NO: 4288 - DNA, 188 bp, Artificial Sequence
  Synthetic polynucleotide
atcatctcaccttgcctcctgggcgtcatattcccagccctgcagggtattcccaaacagagtattcccaaactcggtattcccaaacgacgtattcccaaacctagtattcccaaacactgtattcccaaactgcgtattcccaaacgtagtattcccaaacggcgcgccatgcttcatcagactct

SEQ ID NO: 4289 - DNA, 188 bp, Artificial Sequence; identical to SEQ ID NO: 4288
  Synthetic polynucleotide

SEQ ID NO: 4290 - DNA, 180 bp, Artificial Sequence
  Synthetic polynucleotide
atcatctcaccttgcctcctgcataacgtccaacataacctgcaggaacagctgcagagaaacagctgcagtcgaacagctgcaggacaacagctgcagctaaacagctgcagactaacagctgcagtgcaacagctgcaggtaaacagctgcagggcgcgccatgcttcatcagactct

SEQ ID NO: 4291 - DNA, 180 bp, Artificial Sequence; identical to SEQ ID NO: 4290
  Synthetic polynucleotide

SEQ ID NO: 4292 - DNA, 148 bp, Artificial Sequence
  Synthetic polynucleotide
atcatctcaccttgcctcctgacatgaaagaacgcttccctgcaggcagctgcagacagctgctcgcagctgcgaccagctgcctacagctgcactcagctgctgccagctgcgtacagctgcggcgcgccatgcttcatcagactct

SEQ ID NO: 4293 - DNA, 148 bp, Artificial Sequence; identical to SEQ ID NO: 4292
  Synthetic polynucleotide

SEQ ID NO: 4294 - DNA, 164 bp, Artificial Sequence
  Synthetic polynucleotide
atcatctcaccttgcctcctgcccggatctacaatccgcctgcaggtatttacgcagatatttacgctcgtatttacgcgactatttacgcctatatttacgcacttatttacgctgctatttacgcgtatatttacgcggcgcgccatgcttcatcagactct

SEQ ID NO: 4295 - DNA, 164 bp, Artificial Sequence; identical to SEQ ID NO: 4294
  Synthetic polynucleotide

SEQ ID NO: 4296 - DNA, 156 bp, Artificial Sequence
  Synthetic polynucleotide
atcatctcaccttgcctcctgctctcgtcaagttcccgcctgcaggccaggtgtagaccaggtgttcgccaggtgtgacccaggtgtctaccaggtgtactccaggtgttgcccaggtgtgtaccaggtgtggcgcgccatgcttcatcagactct

SEQ ID NO: 4297 - DNA, 156 bp, Artificial Sequence; identical to SEQ ID NO: 4296
  Synthetic polynucleotide

SEQ ID NO: 4298 - DNA, 197 bp, Artificial Sequence
  Synthetic polynucleotide
atcatctcaccttgcctcctgtaatgacgcggtaggttcctgcagggacccggaagcggttagagacccggaagcggtttcggacccggaagcggttgacgacccggaagcggttctagacccggaagcggttactgacccggaagcggtttgcgacccggaagcggttgtaggcgcgccatgcttcatcagactct

SEQ ID NO: 4299 - DNA, 197 bp, Artificial Sequence; identical to SEQ ID NO: 4298
  Synthetic polynucleotide

SEQ ID NO: 4300 - DNA, 197 bp, Artificial Sequence
  Synthetic polynucleotide
atcatctcaccttgcctcctgccgatgtcacaggagagcctgcaggaaccacctgttgctcagaaaccacctgttgctctcgaaccacctgttgctcgacaaccacctgttgctcctaaaccacctgttgctcactaaccacctgttgctctgcaaccacctgttgctcgtaggcgcgccatgcttcatcagactct

SEQ ID NO: 4301 - DNA, 197 bp, Artificial Sequence; identical to SEQ ID NO: 4300
  Synthetic polynucleotide

SEQ ID NO: 4302 - DNA, 188 bp, Artificial Sequence
  Synthetic polynucleotide
atcatctcaccttgcctcctgataggtctacccgaaggcctgcagggccgcacgtacgagagccgcacgtacgtcggccgcacgtacggacgccgcacgtacgctagccgcacgtacgactgccgcacgtacgtgcgccgcacgtacggtagccgcacgtacgggcgcgccatgcttcatcagactct

SEQ ID NO: 4303 - DNA, 188 bp, Artificial Sequence; identical to SEQ ID NO: 4302
  Synthetic polynucleotide

SEQ ID NO: 4304 - DNA, 190 bp, Artificial Sequence
  Synthetic polynucleotide
atcatctcaccttgcctcctggtcgaattcgctcacatcctgcaggttaagaggaagttaagattaagaggaagttatcgttaagaggaagttagacttaagaggaagttactattaagaggaagttaactttaagaggaagttatgcttaagaggaagttagtaggcgcgccatgcttcatcagactct

SEQ ID NO: 4305 - DNA, 190 bp, Artificial Sequence; identical to SEQ ID NO: 4304
  Synthetic polynucleotide

SEQ ID NO: 4306 - DNA, 191 bp, Artificial Sequence
  Synthetic polynucleotide
atcatctcaccttgcctcctgatgcatggcctccatcccctgcaggtgttgtgtccgtgccatctggagatgttgtgtccgtgccatctggtcgtgttgtgtccgtgccatctgggactgttgtgtccgtgccatctggctatgttgtgtccgtgccatctggactggcgcgccatgcttcatcagactct

SEQ ID NO: 4307 - DNA, 191 bp, Artificial Sequence; identical to SEQ ID NO: 4306
  Synthetic polynucleotide

SEQ ID NO: 4308 - DNA, 188 bp, Artificial Sequence
  Synthetic polynucleotide
atcatctcaccttgcctcctgtaattcgttcgaatctccctgcaggtctatttttagaagatctatttttagatcgtctatttttagagactctatttttagactatctatttttagaacttctatttttagatgctctatttttagagtatctatttttagaggcgcgccatgcttcatcagactct

SEQ ID NO: 4309 - DNA, 188 bp, Artificial Sequence; identical to SEQ ID NO: 4308
  Synthetic polynucleotide

SEQ ID NO: 4310 - DNA, 196 bp, Artificial Sequence
  Synthetic polynucleotide
atcatctcaccttgcctcctggactgttgagcggatatcctgcaggcggctctatcatcagacggctctatcatctcgcggctctatcatcgaccggctctatcatcctacggctctatcatcactcggctctatcatctgccggctctatcatcgtacggctctatcatcggcgcgccatgcttcatcagactct

SEQ ID NO: 4311 - DNA, 196 bp, Artificial Sequence; identical to SEQ ID NO: 4310
  Synthetic polynucleotide

SEQ ID NO: 4312 - DNA, 196 bp, Artificial Sequence
  Synthetic polynucleotide
atcatctcaccttgcctcctgatcatctgaggagaatgcctgcaggcacttcctggttcagacacttcctggttctcgcacttcctggttcgaccacttcctggttcctacacttcctggttcactcacttcctggttctgccacttcctggttcgtacacttcctggttcggcgcgccatgcttcatcagactct

SEQ ID NO: 4313 - DNA, 196 bp, Artificial Sequence; identical to SEQ ID NO: 4312
  Synthetic polynucleotide

SEQ ID NO: 4314 - DNA, 140 bp, Artificial Sequence
  Synthetic polynucleotide
atcatctcaccttgcctcctgcactcactggtgcaacacctgcaggtagttaagatagttatcgtagttagactagttactatagttaacttagttatgctagttagtatagttaggcgcgccatgcttcatcagactct

SEQ ID NO: 4315 - DNA, 140 bp, Artificial Sequence; identical to SEQ ID NO: 4314
  Synthetic polynucleotide

SEQ ID NO: 4316 - DNA, 200 bp, Artificial Sequence
  Synthetic polynucleotide
atcatctcaccttgcctcctgccagccgtcgttaattccctgcaggtcagcaccacggacagcgcagatcagcaccacggacagcgctcgtcagcaccacggacagcgcgactcagcaccacggacagcgcctatcagcaccacggacagcgcacttcagcaccacggacagcgcggcgcgccatgcttcatcagactct

SEQ ID NO: 4317 - DNA, 200 bp, Artificial Sequence; identical to SEQ ID NO: 4316
  Synthetic polynucleotide

SEQ ID NO: 4318 - DNA, 190 bp, Artificial Sequence
  Synthetic polynucleotide
atcatctcaccttgcctcctgatgaccgcgacagtcgacctgcaggctggtttgaactggagactggtttgaactggtcgctggtttgaactgggacctggtttgaactggctactggtttgaactggactctggtttgaactggtgcctggtttgaactgggtaggcgcgccatgcttcatcagactct

SEQ ID NO: 4319 - DNA, 190 bp, Artificial Sequence; identical to SEQ ID NO: 4318
  Synthetic polynucleotide

SEQ ID NO: 4320 - DNA, 180 bp, Artificial Sequence
  Synthetic polynucleotide
atcatctcaccttgcctcctgccgcttgtcctcatcgacctgcagggattgcacaatagagattgcacaattcggattgcacaatgacgattgcacaatctagattgcacaatactgattgcacaattgcgattgcacaatgtagattgcacaatggcgcgccatgcttcatcagactct

SEQ ID NO: 4321 - DNA, 180 bp, Artificial Sequence; identical to SEQ ID NO: 4320
  Synthetic polynucleotide

SEQ ID NO: 4322 - DNA, 156 bp, Artificial Sequence
  Synthetic polynucleotide
atcatctcaccttgcctcctgtcactccagagtgcgctcctgcagggctaattgagagctaattgtcggctaattggacgctaattgctagctaattgactgctaattgtgcgctaattggtagctaattgggcgcgccatgcttcatcagactct

SEQ ID NO: 4323 - DNA, 156 bp, Artificial Sequence; identical to SEQ ID NO: 4322
  Synthetic polynucleotide

SEQ ID NO: 4324 - DNA, 156 bp, Artificial Sequence
  Synthetic polynucleotide
atcatctcaccttgcctcctggatcacccttataacaacctgcagggagcgggaagagagcgggatcggagcgggagacgagcgggactagagcgggaactgagcgggatgcgagcgggagtagagcgggaggcgcgccatgcttcatcagactct

SEQ ID NO: 4325 - DNA, 156 bp, Artificial Sequence; identical to SEQ ID NO: 4324
  Synthetic polynucleotide

SEQ ID NO: 4326 - DNA, 180 bp, Artificial Sequence
  Synthetic polynucleotide
atcatctcaccttgcctcctgtgagtgtgcagagtatgcctgcaggggcaggtgccgagaggcaggtgccgtcgggcaggtgccggacggcaggtgccgctaggcaggtgccgactggcaggtgccgtgcggcaggtgccggtaggcaggtgccgggcgcgccatgcttcatcagactct

SEQ ID NO: 4327 - DNA, 180 bp, Artificial Sequence; identical to SEQ ID NO: 4326
  Synthetic polynucleotide

SEQ ID NO: 4328 - DNA, 164 bp, Artificial Sequence
  Synthetic polynucleotide
atcatctcaccttgcctcctgtggtgatgggtggtactcctgcaggtttaattagagatttaattagtcgtttaattaggactttaattagctatttaattagacttttaattagtgctttaattaggtatttaattagggcgcgccatgcttcatcagactct

SEQ ID NO: 4329 - DNA, 164 bp, Artificial Sequence; identical to SEQ ID NO: 4328
  Synthetic polynucleotide

SEQ ID NO: 4330 - DNA, 188 bp, Artificial Sequence
  Synthetic polynucleotide
atcatctcaccttgcctcctggcttgtccagtatagcacctgcaggtgacagctgtcaagatgacagctgtcatcgtgacagctgtcagactgacagctgtcactatgacagctgtcaacttgacagctgtcatgctgacagctgtcagtatgacagctgtcaggcgcgccatgcttcatcagactct

SEQ ID NO: 4331 - DNA, 188 bp, Artificial Sequence; identical to SEQ ID NO: 4330
  Synthetic polynucleotide

SEQ ID NO: 4332 - DNA, 180 bp, Artificial Sequence
  Synthetic polynucleotide
atcatctcaccttgcctcctggcaggaggtgttctagtcctgcaggggggcagctggagaggggcagctggtcgggggcagctgggacggggcagctggctaggggcagctggactggggcagctggtgcggggcagctgggtaggggcagctggggcgcgccatgcttcatcagactct

SEQ ID NO: 4333 - DNA, 180 bp, Artificial Sequence; identical to SEQ ID NO: 4332
  Synthetic polynucleotide

SEQ ID NO: 4334 - DNA, 191 bp, Artificial Sequence
  Synthetic polynucleotide
atcatctcaccttgcctcctgcttcgcgaagtactcgccctgcaggttatccatcccataataagattatccatcccataatatcgttatccatcccataatagacttatccatcccataatactattatccatcccataataactttatccatcccataatatgcggcgcgccatgcttcatcagactct

SEQ ID NO: 4335 - DNA, 191 bp, Artificial Sequence; identical to SEQ ID NO: 4334
  Synthetic polynucleotide

SEQ ID NO: 4336 - DNA, 156 bp, Artificial Sequence
  Synthetic polynucleotide
atcatctcaccttgcctcctgaaccagccatgataccacctgcagggctaattaagagctaattatcggctaattagacgctaattactagctaattaactgctaattatgcgctaattagtagctaattaggcgcgccatgcttcatcagactct

SEQ ID NO: 4337 - DNA, 156 bp, Artificial Sequence; identical to SEQ ID NO: 4336
  Synthetic polynucleotide

SEQ ID NO: 4338 - DNA, 190 bp, Artificial Sequence
  Synthetic polynucleotide
atcatctcaccttgcctcctgccttaagtagaaatgtccctgcaggttgacagctgtcaaagattgacagctgtcaatcgttgacagctgtcaagacttgacagctgtcaactattgacagctgtcaaactttgacagctgtcaatgcttgacagctgtcaagtaggcgcgccatgcttcatcagactct

SEQ ID NO: 4339 - DNA, 190 bp, Artificial Sequence; identical to SEQ ID NO: 4338
  Synthetic polynucleotide

SEQ ID NO: 4340 - DNA, 172 bp, Artificial Sequence
  Synthetic polynucleotide
atcatctcaccttgcctcctgttcgatcgttaggacatcctgcaggcaggtgtgtgagacaggtgtgtgtcgcaggtgtgtggaccaggtgtgtgctacaggtgtgtgactcaggtgtgtgtgccaggtgtgtggtacaggtgtgtgggcgcgccatgcttcatcagactct

SEQ ID NO: 4341 - DNA, 172 bp, Artificial Sequence; identical to SEQ ID NO: 4340
  Synthetic polynucleotide

SEQ ID NO: 4342 - DNA, 156 bp, Artificial Sequence
  Synthetic polynucleotide
atcatctcaccttgcctcctggtaacgaccctctagttcctgcaggtgacacctagatgacaccttcgtgacacctgactgacacctctatgacacctacttgacaccttgctgacacctgtatgacacctggcgcgccatgcttcatcagactct

SEQ ID NO: 4343 - DNA, 156 bp, Artificial Sequence; identical to SEQ ID NO: 4342
  Synthetic polynucleotide

SEQ ID NO: 4344 - DNA, 148 bp, Artificial Sequence
  Synthetic polynucleotide
atcatctcaccttgcctcctggacgcgatgatagtcaccctgcaggcaccccaagacaccccatcgcaccccagaccaccccactacaccccaactcaccccatgccaccccagtacaccccaggcgcgccatgcttcatcagactct

SEQ ID NO: 4345 - DNA, 148 bp, Artificial Sequence; identical to SEQ ID NO: 4344
  Synthetic polynucleotide

SEQ ID NO: 4346 - DNA, 185 bp, Artificial Sequence
  Synthetic polynucleotide
atcatctcaccttgcctcctgctctaactgtggcaattcctgcaggtacttaattaatacatagatacttaattaatacattcgtacttaattaatacatgactacttaattaatacatctatacttaattaatacatacttacttaattaatacattgcggcgcgccatgcttcatcagactct

SEQ ID NO: 4347 - DNA, 185 bp, Artificial Sequence; identical to SEQ ID NO: 4346
  Synthetic polynucleotide

SEQ ID NO: 4348 - DNA, 191 bp, Artificial Sequence
  Synthetic polynucleotide
atcatctcaccttgcctcctgcgaattcgttattgacccctgcaggaatgctgactcagcacaagaaatgctgactcagcacatcgaatgctgactcagcacagacaatgctgactcagcacactaaatgctgactcagcacaactaatgctgactcagcacatgcggcgcgccatgcttcatcagactct

SEQ ID NO: 4349 - DNA, 191 bp, Artificial Sequence; identical to SEQ ID NO: 4348
  Synthetic polynucleotide

SEQ ID NO: 4350 - DNA, 191 bp, Artificial Sequence
  Synthetic polynucleotide
atcatctcaccttgcctcctgacgatatcatgaaagagcctgcaggtaattaattaataattaagataattaattaataattatcgtaattaattaataattagactaattaattaataattactataattaattaataattaacttaattaattaataattatgcggcgcgccatgcttcatcagactct

SEQ ID NO: 4351 - DNA, 191 bp, Artificial Sequence; identical to SEQ ID NO: 4350
  Synthetic polynucleotide

SEQ ID NO: 4352 - DNA, 164 bp, Artificial Sequence
  Synthetic polynucleotide
atcatctcaccttgcctcctggactattgatggtgcctcctgcaggtcatttcctagatcatttccttcgtcatttcctgactcatttcctctatcatttcctacttcatttccttgctcatttcctgtatcatttcctggcgcgccatgcttcatcagactct

SEQ ID NO: 4353 - DNA, 164 bp, Artificial Sequence; identical to SEQ ID NO: 4352
  Synthetic polynucleotide

SEQ ID NO: 4354 - DNA, 172 bp, Artificial Sequence
  Synthetic polynucleotide
atcatctcaccttgcctcctggtacaagacggaacccacctgcaggaaaagtcaaaagaaaaagtcaaatcgaaaagtcaaagacaaaagtcaaactaaaaagtcaaaactaaaagtcaaatgcaaaagtcaaagtaaaaagtcaaaggcgcgccatgcttcatcagactct

SEQ ID NO: 4355 - DNA, 172 bp, Artificial Sequence; identical to SEQ ID NO: 4354
  Synthetic polynucleotide

SEQ ID NO: 4356 - DNA, 188 bp, Artificial Sequence
  Synthetic polynucleotide
atcatctcaccttgcctcctgtcagaatccgcatgactcctgcaggcccaattaggaaagacccaattaggaatcgcccaattaggaagaccccaattaggaactacccaattaggaaactcccaattaggaatgccccaattaggaagtacccaattaggaaggcgcgccatgcttcatcagactct

SEQ ID NO: 4357 - DNA, 188 bp, Artificial Sequence; identical to SEQ ID NO: 4356
  Synthetic polynucleotide

SEQ ID NO: 4358 - DNA, 200 bp, Artificial Sequence
  Synthetic polynucleotide
atcatctcaccttgcctcctgcgacaggcaaatggtaacctgcagggggggcagccaagcgtgacagagggggcagccaagcgtgactcggggggcagccaagcgtgacgacgggggcagccaagcgtgacctagggggcagccaagcgtgacactgggggcagccaagcgtgacggcgcgccatgcttcatcagactct

SEQ ID NO: 4359 - DNA, 200 bp, Artificial Sequence; identical to SEQ ID NO: 4358
  Synthetic polynucleotide

SEQ ID NO: 4360 - DNA, 185 bp, Artificial Sequence
  Synthetic polynucleotide
atcatctcaccttgcctcctgtaggtcttgattggcaacctgcaggaaattcaagtggcttaagaaaattcaagtggcttatcgaaattcaagtggcttagacaaattcaagtggcttactaaaattcaagtggcttaactaaattcaagtggcttatgcggcgcgccatgcttcatcagactct

SEQ ID NO: 4361 - DNA, 185 bp, Artificial Sequence; identical to SEQ ID NO: 4360
  Synthetic polynucleotide

SEQ ID NO: 4362 - DNA, 164 bp, Artificial Sequence
  Synthetic polynucleotide
atcatctcaccttgcctcctgacgtatcccttacatagcctgcaggaagtccagtagaaagtccagttcgaagtccagtgacaagtccagtctaaagtccagtactaagtccagttgcaagtccagtgtaaagtccagtggcgcgccatgcttcatcagactct

SEQ ID NO: 4363 - DNA, 164 bp, Artificial Sequence; identical to SEQ ID NO: 4362
  Synthetic polynucleotide

SEQ ID NO: 4364 - DNA, 172 bp, Artificial Sequence
  Synthetic polynucleotide
atcatctcaccttgcctcctgcaccacaaagtaaacagcctgcagggatgactcatagagatgactcattcggatgactcatgacgatgactcatctagatgactcatactgatgactcattgcgatgactcatgtagatgactcatggcgcgccatgcttcatcagactct

SEQ ID NO: 4365 - DNA, 172 bp, Artificial Sequence; identical to SEQ ID NO: 4364
  Synthetic polynucleotide

SEQ ID NO: 4366 - DNA, 185 bp, Artificial Sequence
  Synthetic polynucleotide
atcatctcaccttgcctcctggaaatctgtaacggtaacctgcaggataggggcggggtcgaagaataggggcggggtcgatcgataggggcggggtcgagacataggggcggggtcgactaataggggcggggtcgaactataggggcggggtcgatgcggcgcgccatgcttcatcagactct

SEQ ID NO: 4367 - DNA, 185 bp, Artificial Sequence; identical to SEQ ID NO: 4366
  Synthetic polynucleotide

SEQ ID NO: 4368 - DNA, 191 bp, Artificial Sequence
  Synthetic polynucleotide
atcatctcaccttgcctcctgatcatgtggtggcatttcctgcaggcaccgctaattaggggtagacaccgctaattaggggttcgcaccgctaattaggggtgaccaccgctaattaggggtctacaccgctaattaggggtactcaccgctaattaggggttgcggcgcgccatgcttcatcagactct

SEQ ID NO: 4369 - DNA, 191 bp, Artificial Sequence; identical to SEQ ID NO: 4368
  Synthetic polynucleotide

SEQ ID NO: 4370 - DNA, 172 bp, Artificial Sequence
  Synthetic polynucleotide
atcatctcaccttgcctcctgaatagttatgccggcgacctgcaggtgtaaacaaaagatgtaaacaaatcgtgtaaacaaagactgtaaacaaactatgtaaacaaaacttgtaaacaaatgctgtaaacaaagtatgtaaacaaaggcgcgccatgcttcatcagactct

SEQ ID NO: 4371 - DNA, 172 bp, Artificial Sequence; identical to SEQ ID NO: 4370
  Synthetic polynucleotide

SEQ ID NO: 4372 - DNA, 185 bp, Artificial Sequence
  Synthetic polynucleotide
atcatctcaccttgcctcctgagcgatacgcgactgaccctgcagggcttcgtggggggtctagagcttcgtggggggtcttcggcttcgtggggggtctgacgcttcgtggggggtctctagcttcgtggggggtctactgcttcgtggggggtcttgcggcgcgccatgcttcatcagactct

SEQ ID NO: 4373 - DNA, 185 bp, Artificial Sequence; identical to SEQ ID NO: 4372
  Synthetic polynucleotide

SEQ ID NO: 4374 - DNA, 156 bp, Artificial Sequence
  Synthetic polynucleotide
atcatctcaccttgcctcctgtgtaccgtaagcaataccctgcaggccaggtggagaccaggtggtcgccaggtgggacccaggtggctaccaggtggactccaggtggtgcccaggtgggtaccaggtggggcgcgccatgcttcatcagactct

SEQ ID NO: 4375 - DNA, 156 bp, Artificial Sequence; identical to SEQ ID NO: 4374
  Synthetic polynucleotide

SEQ ID NO: 4376 - DNA, 188 bp, Artificial Sequence
  Synthetic polynucleotide
atcatctcaccttgcctcctgaatacagctcgcggcatcctgcaggtgcagtgatttaagatgcagtgatttatcgtgcagtgatttagactgcagtgatttactatgcagtgatttaacttgcagtgatttatgctgcagtgatttagtatgcagtgatttaggcgcgccatgcttcatcagactct

SEQ ID NO: 4377 - DNA, 188 bp, Artificial Sequence; identical to SEQ ID NO: 4376
  Synthetic polynucleotide

SEQ ID NO: 4378 - DNA, 190 bp, Artificial Sequence
  Synthetic polynucleotide
atcatctcaccttgcctcctgcgtgaccggtccctattcctgcagggcaacagctgttgtagagcaacagctgttgttcggcaacagctgttgtgacgcaacagctgttgtctagcaacagctgttgtactgcaacagctgttgttgcgcaacagctgttgtgtaggcgcgccatgcttcatcagactct

SEQ ID NO: 4379 - DNA, 190 bp, Artificial Sequence; identical to SEQ ID NO: 4378
  Synthetic polynucleotide

SEQ ID NO: 4380 - DNA, 188 bp, Artificial Sequence
  Synthetic polynucleotide
atcatctcaccttgcctcctgataagtgggttggtgttcctgcaggcctttgatctttagacctttgatcttttcgcctttgatctttgaccctttgatctttctacctttgatctttactcctttgatcttttgccctttgatctttgtacctttgatctttggcgcgccatgcttcatcagactct

SEQ ID NO: 4381 - DNA, 188 bp, Artificial Sequence; identical to SEQ ID NO: 4380
  Synthetic polynucleotide

SEQ ID NO: 4382 - DNA, 172 bp, Artificial Sequence
  Synthetic polynucleotide
atcatctcaccttgcctcctgagttgtagcttccaagccctgcagggacacgtggtagagacacgtggttcggacacgtggtgacgacacgtggtctagacacgtggtactgacacgtggttgcgacacgtggtgtagacacgtggtggcgcgccatgcttcatcagactct

SEQ ID NO: 4383 - DNA, 172 bp, Artificial Sequence; identical to SEQ ID NO: 4382
  Synthetic polynucleotide

SEQ ID NO: 4384 - DNA, 180 bp, Artificial Sequence
  Synthetic polynucleotide
atcatctcaccttgcctcctgtgccatcaggaggtaaacctgcaggcagggtgtggcagacagggtgtggctcgcagggtgtggcgaccagggtgtggcctacagggtgtggcactcagggtgtggctgccagggtgtggcgtacagggtgtggcggcgcgccatgcttcatcagactct

SEQ ID NO: 4385 - DNA, 180 bp, Artificial Sequence; identical to SEQ ID NO: 4384
  Synthetic polynucleotide

SEQ ID NO: 4386 - DNA, 185 bp, Artificial Sequence
  Synthetic polynucleotide
atcatctcaccttgcctcctgcttgcttggtataagaccctgcaggtaacgtccgctagcgcagataacgtccgctagcgctcgtaacgtccgctagcgcgactaacgtccgctagcgcctataacgtccgctagcgcacttaacgtccgctagcgctgcggcgcgccatgcttcatcagactct

SEQ ID NO: 4387 - DNA, 185 bp, Artificial Sequence; identical to SEQ ID NO: 4386
  Synthetic polynucleotide

SEQ ID NO: 4388 - DNA, 185 bp, Artificial Sequence
  Synthetic polynucleotide
atcatctcaccttgcctcctgtgatagcccaggctcgacctgcaggtacccacaatgcattgagatacccacaatgcattgtcgtacccacaatgcattggactacccacaatgcattgctatacccacaatgcattgacttacccacaatgcattgtgcggcgcgccatgcttcatcagactct

SEQ ID NO: 4389 - DNA, 185 bp, Artificial Sequence; identical to SEQ ID NO: 4388
  Synthetic polynucleotide

SEQ ID NO: 4390 - DNA, 197 bp, Artificial Sequence
  Synthetic polynucleotide
atcatctcaccttgcctcctgttaggtccctggtcgatcctgcagggccatatatggccagagagccatatatggccagtcggccatatatggccaggacgccatatatggccagctagccatatatggccagactgccatatatggccagtgcgccatatatggccaggtaggcgcgccatgcttcatcagactct

SEQ ID NO: 4391 - DNA, 197 bp, Artificial Sequence; identical to SEQ ID NO: 4390
  Synthetic polynucleotide

SEQ ID NO: 4392 - DNA, 197 bp, Artificial Sequence
  Synthetic polynucleotide
atcatctcaccttgcctcctgttacaattacgccagttcctgcaggattgcctgaggcgatagaattgcctgaggcgattcgattgcctgaggcgatgacattgcctgaggcgatctaattgcctgaggcgatactattgcctgaggcgattgcattgcctgaggcgatgtaggcgcgccatgcttcatcagactct

SEQ ID NO: 4393 - DNA, 197 bp, Artificial Sequence; identical to SEQ ID NO: 4392
  Synthetic polynucleotide

SEQ ID NO: 4394 - DNA, 188 bp, Artificial Sequence
  Synthetic polynucleotide
atcatctcaccttgcctcctgtatcagcgaccggaatccctgcaggctatcggttgatagactatcggttgattcgctatcggttgatgacctatcggttgatctactatcggttgatactctatcggttgattgcctatcggttgatgtactatcggttgatggcgcgccatgcttcatcagactct

SEQ ID NO: 4395 - DNA, 188 bp, Artificial Sequence; identical to SEQ ID NO: 4394
  Synthetic polynucleotide

SEQ ID NO: 4396 - DNA, 197 bp, Artificial Sequence
  Synthetic polynucleotide
atcatctcaccttgcctcctggtcgaccgaatagacggcctgcagggaggtcaaaggtcaaagagaggtcaaaggtcaatcggaggtcaaaggtcaagacgaggtcaaaggtcaactagaggtcaaaggtcaaactgaggtcaaaggtcaatgcgaggtcaaaggtcaagtaggcgcgccatgcttcatcagactct

SEQ ID NO: 4397 - DNA, 197 bp, Artificial Sequence; identical to SEQ ID NO: 4396
  Synthetic polynucleotide

SEQ ID NO: 4398 - DNA, 196 bp, Artificial Sequence
  Synthetic polynucleotide
atcatctcaccttgcctcctggaccagcccgttctattcctgcaggatcccccccaccgagaatcccccccaccgtcgatcccccccaccggacatcccccccaccgctaatcccccccaccgactatcccccccaccgtgcatcccccccaccggtaatcccccccaccgggcgcgccatgcttcatcagactct

SEQ ID NO: 4399 - DNA, 196 bp, Artificial Sequence; identical to SEQ ID NO: 4398
  Synthetic polynucleotide

SEQ ID NO: 4400 - DNA, 197 bp, Artificial Sequence
  Synthetic polynucleotide
atcatctcaccttgcctcctgacctagtacctcgtaagcctgcaggaaaaacggattattgagaaaaaacggattattgtcgaaaaacggattattggacaaaaacggattattgctaaaaaacggattattgactaaaaacggattattgtgcaaaaacggattattggtaggcgcgccatgcttcatcagactct

SEQ ID NO: 4401 - DNA, 197 bp, Artificial Sequence; identical to SEQ ID NO: 4400
  Synthetic polynucleotide

SEQ ID NO: 4402 - DNA, 185 bp, Artificial Sequence
  Synthetic polynucleotide
atcatctcaccttgcctcctgaataacctaaacgcccgcctgcagggataattataattagcagagataattataattagctcggataattataattagcgacgataattataattagcctagataattataattagcactgataattataattagctgcggcgcgccatgcttcatcagactct

SEQ ID NO: 4403 - DNA, 185 bp, Artificial Sequence; identical to SEQ ID NO: 4402
  Synthetic polynucleotide

SEQ ID NO: 4404 - DNA, 180 bp, Artificial Sequence
  Synthetic polynucleotide
atcatctcaccttgcctcctgtcaatgaaagccgaagacctgcaggtctgagtcaccagatctgagtcacctcgtctgagtcaccgactctgagtcaccctatctgagtcaccacttctgagtcacctgctctgagtcaccgtatctgagtcaccggcgcgccatgcttcatcagactct

SEQ ID NO: 4405 - DNA, 180 bp, Artificial Sequence; identical to SEQ ID NO: 4404
  Synthetic polynucleotide

SEQ ID NO: 4406 - DNA, 190 bp, Artificial Sequence
  Synthetic polynucleotide
atcatctcaccttgcctcctgttctaatgaggcgatagcctgcaggcggtgacgtcatcaagacggtgacgtcatcatcgcggtgacgtcatcagaccggtgacgtcatcactacggtgacgtcatcaactcggtgacgtcatcatgccggtgacgtcatcagtaggcgcgccatgcttcatcagactct

SEQ ID NO: 4407 - DNA, 190 bp, Artificial Sequence; identical to SEQ ID NO: 4406
  Synthetic polynucleotide

SEQ ID NO: 4408 - DNA, 188 bp, Artificial Sequence
  Synthetic polynucleotide
atcatctcaccttgcctcctgcctaattgcctgggtctcctgcaggttccctggcaacagattccctggcaactcgttccctggcaacgacttccctggcaacctattccctggcaacactttccctggcaactgcttccctggcaacgtattccctggcaacggcgcgccatgcttcatcagactct

SEQ ID NO: 4409 - DNA, 188 bp, Artificial Sequence; identical to SEQ ID NO: 4408
  Synthetic polynucleotide

SEQ ID NO: 4410 - DNA, 197 bp, Artificial Sequence
  Synthetic polynucleotide
atcatctcaccttgcctcctggaagctacaactcgaagcctgcaggattgcctgaggcgaaagaattgcctgaggcgaatcgattgcctgaggcgaagacattgcctgaggcgaactaattgcctgaggcgaaactattgcctgaggcgaatgcattgcctgaggcgaagtaggcgcgccatgcttcatcagactct

SEQ ID NO: 4411 - DNA, 197 bp, Artificial Sequence; identical to SEQ ID NO: 4410
  Synthetic polynucleotide

SEQ ID NO: 4412 - DNA, 197 bp, Artificial Sequence
  Synthetic polynucleotide
atcatctcaccttgcctcctgaacgatctgctcgtagtcctgcaggtgacctcacatgacctttagatgacctcacatgaccttttcgtgacctcacatgacctttgactgacctcacatgacctttctatgacctcacatgacctttacttgacctcacatgaccttttgcggcgcgccatgcttcatcagactct

SEQ ID NO: 4413 - DNA, 197 bp, Artificial Sequence; identical to SEQ ID NO: 4412
  Synthetic polynucleotide

SEQ ID NO: 4414 - DNA, 172 bp, Artificial Sequence
  Synthetic polynucleotide
atcatctcaccttgcctcctgtgcaactaaccctcccacctgcaggttgtagttttagattgtagtttttcgttgtagttttgacttgtagttttctattgtagttttactttgtagtttttgcttgtagttttgtattgtagttttggcgcgccatgcttcatcagactct

SEQ ID NO: 4415 - DNA, 172 bp, Artificial Sequence; identical to SEQ ID NO: 4414
  Synthetic polynucleotide

SEQ ID NO: 4416 - DNA, 190 bp, Artificial Sequence
  Synthetic polynucleotide
atcatctcaccttgcctcctggccgtacaaatgtgcgccctgcaggagggggatcgatggagaagggggatcgatggtcgagggggatcgatgggacagggggatcgatggctaagggggatcgatggactagggggatcgatggtgcagggggatcgatgggtaggcgcgccatgcttcatcagactct

SEQ ID NO: 4417 - DNA, 190 bp, Artificial Sequence; identical to SEQ ID NO: 4416
  Synthetic polynucleotide

SEQ ID NO: 4418 - DNA, 197 bp, Artificial Sequence
  Synthetic polynucleotide
atcatctcaccttgcctcctgatgattaggctgtggtgcctgcaggggggtcaggaaagttcagagaggggtcaggaaagttcagtcgggggtcaggaaagttcaggacggggtcaggaaagttcagctaggggtcaggaaagttcagactggggtcaggaaagttcagtgcggcgcgccatgcttcatcagactct

SEQ ID NO: 4419 - DNA, 197 bp, Artificial Sequence; identical to SEQ ID NO: 4418
  Synthetic polynucleotide

SEQ ID NO: 4420 - DNA, 197 bp, Artificial Sequence
  Synthetic polynucleotide
atcatctcaccttgcctcctgtcagccagcctgaggttcctgcaggagataagataagataagaagataagataagatatcgagataagataagatagacagataagataagatactaagataagataagataactagataagataagatatgcagataagataagatagtaggcgcgccatgcttcatcagactct

SEQ ID NO: 4421 - DNA, 197 bp, Artificial Sequence; identical to SEQ ID NO: 4420
  Synthetic polynucleotide

SEQ ID NO: 4422 - DNA, 190 bp, Artificial Sequence
  Synthetic polynucleotide
atcatctcaccttgcctcctgtcatttaccgtggaagtcctgcaggtgctgagtcatggtagatgctgagtcatggttcgtgctgagtcatggtgactgctgagtcatggtctatgctgagtcatggtacttgctgagtcatggttgctgctgagtcatggtgtaggcgcgccatgcttcatcagactct

SEQ ID NO: 4423 - DNA, 190 bp, Artificial Sequence; identical to SEQ ID NO: 4422
  Synthetic polynucleotide

SEQ ID NO: 4424 - DNA, 196 bp, Artificial Sequence
  Synthetic polynucleotide
atcatctcaccttgcctcctgacgaagcgtttaagggacctgcaggcaattacgtaactagacaattacgtaacttcgcaattacgtaactgaccaattacgtaactctacaattacgtaactactcaattacgtaacttgccaattacgtaactgtacaattacgtaactggcgcgccatgcttcatcagactct

SEQ ID NO: 4425 - DNA, 196 bp, Artificial Sequence; identical to SEQ ID NO: 4424
  Synthetic polynucleotide

SEQ ID NO: 4426 - DNA, 197 bp, Artificial Sequence
  Synthetic polynucleotide
atcatctcaccttgcctcctggtctcttcttgtagctgcctgcaggaacgaaaccgaaactagaaacgaaaccgaaacttcgaacgaaaccgaaactgacaacgaaaccgaaactctaaacgaaaccgaaactactaacgaaaccgaaacttgcaacgaaaccgaaactgtaggcgcgccatgcttcatcagactct

SEQ ID NO: 4427 - DNA, 197 bp, Artificial Sequence; identical to SEQ ID NO: 4426
  Synthetic polynucleotide

SEQ ID NO: 4428 - DNA, 180 bp, Artificial Sequence
  Synthetic polynucleotide
atcatctcaccttgcctcctgacctgactaccggtttacctgcaggacccggatgtaagaacccggatgtatcgacccggatgtagacacccggatgtactaacccggatgtaactacccggatgtatgcacccggatgtagtaacccggatgtaggcgcgccatgcttcatcagactct

SEQ ID NO: 4429 - DNA, 180 bp, Artificial Sequence; identical to SEQ ID NO: 4428
  Synthetic polynucleotide

SEQ ID NO: 4430 - DNA, 196 bp, Artificial Sequence
  Synthetic polynucleotide
atcatctcaccttgcctcctgtacgccttcccgatggacctgcaggtcaatgttattgaagatcaatgttattgatcgtcaatgttattgagactcaatgttattgactatcaatgttattgaacttcaatgttattgatgctcaatgttattgagtatcaatgttattgaggcgcgccatgcttcatcagactct

SEQ ID NO: 4431 - DNA, 196 bp, Artificial Sequence; identical to SEQ ID NO: 4430
  Synthetic polynucleotide

SEQ ID NO: 4432 - DNA, 188 bp, Artificial Sequence
  Synthetic polynucleotide
atcatctcaccttgcctcctggatgttacttccgcatgcctgcaggccacgtcaccacagaccacgtcaccactcgccacgtcaccacgacccacgtcaccacctaccacgtcaccacactccacgtcaccactgcccacgtcaccacgtaccacgtcaccacggcgcgccatgcttcatcagactct

SEQ ID NO: 4433 - DNA, 188 bp, Artificial Sequence; identical to SEQ ID NO: 4432
  Synthetic polynucleotide

SEQ ID NO: 4434 - DNA, 156 bp, Artificial Sequence
  Synthetic polynucleotide
atcatctcaccttgcctcctgtggtgtggaagtgcgaacctgcaggccacgtcaagaccacgtcatcgccacgtcagacccacgtcactaccacgtcaactccacgtcatgcccacgtcagtaccacgtcaggcgcgccatgcttcatcagactct

SEQ ID NO: 4435 - DNA, 156 bp, Artificial Sequence; identical to SEQ ID NO: 4434
  Synthetic polynucleotide

SEQ ID NO: 4436 - DNA, 191 bp, Artificial Sequence
  Synthetic polynucleotide
atcatctcaccttgcctcctgttggctgagccattagacctgcaggtggcatttcccggaaatgattagatggcatttcccggaaatgatttcgtggcatttcccggaaatgattgactggcatttcccggaaatgattctatggcatttcccggaaatgattactggcgcgccatgcttcatcagactct

SEQ ID NO: 4437 - DNA, 191 bp, Artificial Sequence; identical to SEQ ID NO: 4436
  Synthetic polynucleotide

SEQ ID NO: 4438 - DNA, 172 bp, Artificial Sequence
  Synthetic polynucleotide
atcatctcaccttgcctcctgccttactcacggatccccctgcaggtaacacctcaagataacacctcatcgtaacacctcagactaacacctcactataacacctcaacttaacacctcatgctaacacctcagtataacacctcaggcgcgccatgcttcatcagactct

SEQ ID NO: 4439 - DNA, 172 bp, Artificial Sequence; identical to SEQ ID NO: 4438
  Synthetic polynucleotide

SEQ ID NO: 4440 - DNA, 180 bp, Artificial Sequence
  Synthetic polynucleotide
atcatctcaccttgcctcctgaaatccgtctttctaggcctgcaggtgacctatttaagatgacctatttatcgtgacctatttagactgacctatttactatgacctatttaacttgacctatttatgctgacctatttagtatgacctatttaggcgcgccatgcttcatcagactct

SEQ ID NO: 4441 - DNA, 180 bp, Artificial Sequence; identical to SEQ ID NO: 4440
  Synthetic polynucleotide

SEQ ID NO: 4442 - DNA, 172 bp, Artificial Sequence
  Synthetic polynucleotide
atcatctcaccttgcctcctgtgaaacatttagcgcaacctgcaggttcacttcctagattcacttccttcgttcacttcctgacttcacttcctctattcacttcctactttcacttccttgcttcacttcctgtattcacttcctggcgcgccatgcttcatcagactct

SEQ ID NO: 4443 - DNA, 172 bp, Artificial Sequence; identical to SEQ ID NO: 4442
  Synthetic polynucleotide

SEQ ID NO: 4444 - DNA, 196 bp, Artificial Sequence
  Synthetic polynucleotide
atcatctcaccttgcctcctgatggtcgtgtgaattaccctgcaggccttagccaatcaagaccttagccaatcatcgccttagccaatcagacccttagccaatcactaccttagccaatcaactccttagccaatcatgcccttagccaatcagtaccttagccaatcaggcgcgccatgcttcatcagactct

SEQ ID NO: 4445 - DNA, 196 bp, Artificial Sequence; identical to SEQ ID NO: 4444
  Synthetic polynucleotide

SEQ ID NO: 4446 - DNA, 191 bp, Artificial Sequence
  Synthetic polynucleotide
atcatctcaccttgcctcctgggcatttccatagggttcctgcaggtaattaattaataacttagataattaattaataactttcgtaattaattaataacttgactaattaattaataacttctataattaattaataacttacttaattaattaataactttgcggcgcgccatgcttcatcagactct

SEQ ID NO: 4447 - DNA, 191 bp, Artificial Sequence; identical to SEQ ID NO: 4446
  Synthetic polynucleotide

SEQ ID NO: 4448 - DNA, 180 bp, Artificial Sequence
  Synthetic polynucleotide
atcatctcaccttgcctcctgttggcgttgtggcaatacctgcaggtttttacgagaagatttttacgagatcgtttttacgagagactttttacgagactatttttacgagaacttttttacgagatgctttttacgagagtatttttacgagaggcgcgccatgcttcatcagactct

SEQ ID NO: 4449 - DNA, 180 bp, Artificial Sequence; identical to SEQ ID NO: 4448
  Synthetic polynucleotide

SEQ ID NO: 4450 - DNA, 164 bp, Artificial Sequence
  Synthetic polynucleotide
atcatctcaccttgcctcctgaaagcttaggaacacggcctgcaggtaattggtcagataattggtctcgtaattggtcgactaattggtcctataattggtcacttaattggtctgctaattggtcgtataattggtcggcgcgccatgcttcatcagactct

SEQ ID NO: 4451 - DNA, 164 bp, Artificial Sequence; identical to SEQ ID NO: 4450
  Synthetic polynucleotide

SEQ ID NO: 4452 - DNA, 180 bp, Artificial Sequence
  Synthetic polynucleotide
atcatctcaccttgcctcctgcaccggcgacaagcttacctgcaggtttttacgagcagatttttacgagctcgtttttacgagcgactttttacgagcctatttttacgagcacttttttacgagctgctttttacgagcgtatttttacgagcggcgcgccatgcttcatcagactct

SEQ ID NO: 4453 - DNA, 180 bp, Artificial Sequence; identical to SEQ ID NO: 4452
  Synthetic polynucleotide

SEQ ID NO: 4454 - DNA, 191 bp, Artificial Sequence
  Synthetic polynucleotide
atcatctcaccttgcctcctgacggcaacgctatccaccctgcagggatagggtatcacttatagagatagggtatcacttattcggatagggtatcacttatgacgatagggtatcacttatctagatagggtatcacttatactgatagggtatcacttattgcggcgcgccatgcttcatcagactct

SEQ ID NO: 4455 - DNA, 191 bp, Artificial Sequence; identical to SEQ ID NO: 4454
  Synthetic polynucleotide

SEQ ID NO: 4456 - DNA, 197 bp, Artificial Sequence
  Synthetic polynucleotide
atcatctcaccttgcctcctgacgtcgagcgacttgcacctgcaggggtttctctccagtaagaggtttctctccagtatcgggtttctctccagtagacggtttctctccagtactaggtttctctccagtaactggtttctctccagtatgcggtttctctccagtagtaggcgcgccatgcttcatcagactct

SEQ ID NO: 4457 - DNA, 197 bp, Artificial Sequence; identical to SEQ ID NO: 4456
  Synthetic polynucleotide

SEQ ID NO: 4458 - DNA, 172 bp, Artificial Sequence
  Synthetic polynucleotide
atcatctcaccttgcctcctgaccctcaattggccaaacctgcaggatttattcatagaatttattcattcgatttattcatgacatttattcatctaatttattcatactatttattcattgcatttattcatgtaatttattcatggcgcgccatgcttcatcagactct

SEQ ID NO: 4459 - DNA, 172 bp, Artificial Sequence; identical to SEQ ID NO: 4458
  Synthetic polynucleotide

SEQ ID NO: 4460 - DNA, 172 bp, Artificial Sequence
  Synthetic polynucleotide
atcatctcaccttgcctcctgaggatggtcagtgtcgccctgcaggtgccaaaattagatgccaaaatttcgtgccaaaattgactgccaaaattctatgccaaaattacttgccaaaatttgctgccaaaattgtatgccaaaattggcgcgccatgcttcatcagactct

SEQ ID NO: 4461 - DNA, 172 bp, Artificial Sequence; identical to SEQ ID NO: 4460
  Synthetic polynucleotide

SEQ ID NO: 4462 - DNA, 197 bp, Artificial Sequence
  Synthetic polynucleotide
atcatctcaccttgcctcctgataagactatactggctcctgcaggccccgcccccgcaccagaccccgcccccgcacctcgccccgcccccgcaccgacccccgcccccgcaccctaccccgcccccgcaccactccccgcccccgcacctgcccccgcccccgcaccgtaggcgcgccatgcttcatcagactct

SEQ ID NO: 4463 - DNA, 197 bp, Artificial Sequence; identical to SEQ ID NO: 4462
  Synthetic polynucleotide

SEQ ID NO: 4464 - DNA, 185 bp, Artificial Sequence
  Synthetic polynucleotide
atcatctcaccttgcctcctgttgtggttcgacgctcgcctgcaggccgtcgccatggcaacagaccgtcgccatggcaactcgccgtcgccatggcaacgacccgtcgccatggcaacctaccgtcgccatggcaacactccgtcgccatggcaactgcggcgcgccatgcttcatcagactct

SEQ ID NO: 4465 - DNA, 185 bp, Artificial Sequence; identical to SEQ ID NO: 4464
  Synthetic polynucleotide

SEQ ID NO: 4466 - DNA, 196 bp, Artificial Sequence
  Synthetic polynucleotide
atcatctcaccttgcctcctgacaccatcttggacaagcctgcaggaatgtaacaatttagaaatgtaacaattttcgaatgtaacaatttgacaatgtaacaatttctaaatgtaacaatttactaatgtaacaattttgcaatgtaacaatttgtaaatgtaacaatttggcgcgccatgcttcatcagactct

SEQ ID NO: 4467 - DNA, 196 bp, Artificial Sequence; identical to SEQ ID NO: 4466
  Synthetic polynucleotide

SEQ ID NO: 4468 - DNA, 190 bp, Artificial Sequence
  Synthetic polynucleotide
atcatctcaccttgcctcctggctggctttccaacgaccctgcaggaggggatttcccagagaaggggatttcccagtcgaggggatttcccaggacaggggatttcccagctaaggggatttcccagactaggggatttcccagtgcaggggatttcccaggtaggcgcgccatgcttcatcagactct

SEQ ID NO: 4469 - DNA, 190 bp, Artificial Sequence; identical to SEQ ID NO: 4468
  Synthetic polynucleotide

SEQ ID NO: 4470 - DNA, 180 bp, Artificial Sequence
  Synthetic polynucleotide
atcatctcaccttgcctcctgccgggaacggtaatcgtcctgcaggtgcgtgggcggagatgcgtgggcggtcgtgcgtgggcgggactgcgtgggcggctatgcgtgggcggacttgcgtgggcggtgctgcgtgggcgggtatgcgtgggcggggcgcgccatgcttcatcagactct

SEQ ID NO: 4471 - DNA, 180 bp, Artificial Sequence; identical to SEQ ID NO: 4470
  Synthetic polynucleotide

SEQ ID NO: 4472 - DNA, 156 bp, Artificial Sequence
  Synthetic polynucleotide
atcatctcaccttgcctcctgggttcaacatcgtttcgcctgcaggatgaacttagaatgaactttcgatgaacttgacatgaacttctaatgaacttactatgaactttgcatgaacttgtaatgaacttggcgcgccatgcttcatcagactct

SEQ ID NO: 4473 - DNA, 156 bp, Artificial Sequence; identical to SEQ ID NO: 4472
  Synthetic polynucleotide

SEQ ID NO: 4474 - DNA, 200 bp, Artificial Sequence
  Synthetic polynucleotide
atcatctcaccttgcctcctgtcgtggctcggtacacacctgcagggccatcatgcgtgacgaggagagccatcatgcgtgacgaggtcggccatcatgcgtgacgagggacgccatcatgcgtgacgaggctagccatcatgcgtgacgaggactgccatcatgcgtgacgaggggcgcgccatgcttcatcagactct

SEQ ID NO: 4475 - DNA, 200 bp, Artificial Sequence; identical to SEQ ID NO: 4474
  Synthetic polynucleotide

SEQ ID NO: 4476 - DNA, 172 bp, Artificial Sequence
  Synthetic polynucleotide
atcatctcaccttgcctcctgtaggctcttatgttcggcctgcaggagggttcaaaagaagggttcaaatcgagggttcaaagacagggttcaaactaagggttcaaaactagggttcaaatgcagggttcaaagtaagggttcaaaggcgcgccatgcttcatcagactct

SEQ ID NO: 4477 - DNA, 172 bp, Artificial Sequence; identical to SEQ ID NO: 4476
  Synthetic polynucleotide

SEQ ID NO: 4478 - DNA, 197 bp, Artificial Sequence
  Synthetic polynucleotide
atcatctcaccttgcctcctgccttccgtgactaccaacctgcaggcatgcccaaataaggcaaagacatgcccaaataaggcaatcgcatgcccaaataaggcaagaccatgcccaaataaggcaactacatgcccaaataaggcaaactcatgcccaaataaggcaatgcggcgcgccatgcttcatcagactct

SEQ ID NO: 4479 - DNA, 197 bp, Artificial Sequence; identical to SEQ ID NO: 4478
  Synthetic polynucleotide

SEQ ID NO: 4480 - DNA, 172 bp, Artificial Sequence
  Synthetic polynucleotide
atcatctcaccttgcctcctgataaggacaatgatccgcctgcaggaaaccggtttagaaaaccggttttcgaaaccggtttgacaaaccggtttctaaaaccggtttactaaaccggttttgcaaaccggtttgtaaaaccggtttggcgcgccatgcttcatcagactct

SEQ ID NO: 4481 - DNA, 172 bp, Artificial Sequence; identical to SEQ ID NO: 4480
  Synthetic polynucleotide

SEQ ID NO: 4482 - DNA, 156 bp, Artificial Sequence
  Synthetic polynucleotide
atcatctcaccttgcctcctgcaagattaagtatccgacctgcaggccgtgactagaccgtgacttcgccgtgactgacccgtgactctaccgtgactactccgtgacttgcccgtgactgtaccgtgactggcgcgccatgcttcatcagactct

SEQ ID NO: 4483 - DNA, 156 bp, Artificial Sequence; identical to SEQ ID NO: 4482
  Synthetic polynucleotide

SEQ ID NO: 4484 - DNA, 180 bp, Artificial Sequence
  Synthetic polynucleotide
atcatctcaccttgcctcctgagcccgacgaatacttacctgcaggggggatttccaagaggggatttccatcgggggatttccagacggggatttccactaggggatttccaactggggatttccatgcggggatttccagtaggggatttccaggcgcgccatgcttcatcagactct

SEQ ID NO: 4485 - DNA, 180 bp, Artificial Sequence; identical to SEQ ID NO: 4484
  Synthetic polynucleotide

SEQ ID NO: 4486 - DNA, 188 bp, Artificial Sequence
  Synthetic polynucleotide
atcatctcaccttgcctcctgcaactttcacccgcatccctgcaggaaaactaggtcaagaaaaactaggtcatcgaaaactaggtcagacaaaactaggtcactaaaaactaggtcaactaaaactaggtcatgcaaaactaggtcagtaaaaactaggtcaggcgcgccatgcttcatcagactct

SEQ ID NO: 4487 - DNA, 188 bp, Artificial Sequence; identical to SEQ ID NO: 4486
  Synthetic polynucleotide

SEQ ID NO: 4488 - DNA, 185 bp, Artificial Sequence
  Synthetic polynucleotide
atcatctcaccttgcctcctgttgaagtctaagggcttcctgcaggaaagctcgtaaaatttagaaaagctcgtaaaattttcgaaagctcgtaaaatttgacaaagctcgtaaaatttctaaaagctcgtaaaatttactaaagctcgtaaaattttgcggcgcgccatgcttcatcagactct

SEQ ID NO: 4489 - DNA, 185 bp, Artificial Sequence; identical to SEQ ID NO: 4488
  Synthetic polynucleotide

SEQ ID NO: 4490 - DNA, 180 bp, Artificial Sequence
  Synthetic polynucleotide
atcatctcaccttgcctcctgtaacgggtacgttacttcctgcaggtttttacgactagatttttacgacttcgtttttacgactgactttttacgactctatttttacgactacttttttacgacttgctttttacgactgtatttttacgactggcgcgccatgcttcatcagactct

SEQ ID NO: 4491 - DNA, 180 bp, Artificial Sequence; identical to SEQ ID NO: 4490
  Synthetic polynucleotide

SEQ ID NO: 4492 - DNA, 180 bp, Artificial Sequence
  Synthetic polynucleotide
atcatctcaccttgcctcctgcagtatcggtgcgcattcctgcaggaatgtaaacaaagaaatgtaaacaatcgaatgtaaacaagacaatgtaaacaactaaatgtaaacaaactaatgtaaacaatgcaatgtaaacaagtaaatgtaaacaaggcgcgccatgcttcatcagactct

SEQ ID NO: 4493 - DNA, 180 bp, Artificial Sequence; identical to SEQ ID NO: 4492
  Synthetic polynucleotide

SEQ ID NO: 4494 - DNA, 172 bp, Artificial Sequence
  Synthetic polynucleotide
atcatctcaccttgcctcctgtgcgcagatcggaaggtcctgcaggattgtacaatagaattgtacaattcgattgtacaatgacattgtacaatctaattgtacaatactattgtacaattgcattgtacaatgtaattgtacaatggcgcgccatgcttcatcagactct

SEQ ID NO: 4495 - DNA, 172 bp, Artificial Sequence; identical to SEQ ID NO: 4494
  Synthetic polynucleotide

SEQ ID NO: 4496 - DNA, 185 bp, Artificial Sequence
  Synthetic polynucleotide
atcatctcaccttgcctcctgaatccacgctctcattacctgcaggtaattggtgctaattgagataattggtgctaattgtcgtaattggtgctaattggactaattggtgctaattgctataattggtgctaattgacttaattggtgctaattgtgcggcgcgccatgcttcatcagactct

SEQ ID NO: 4497 - DNA, 185 bp, Artificial Sequence; identical to SEQ ID NO: 4496
  Synthetic polynucleotide

SEQ ID NO: 4498 - DNA, 164 bp, Artificial Sequence
  Synthetic polynucleotide
atcatctcaccttgcctcctgttgacctaatggctatgcctgcaggagttttccaagaagttttccatcgagttttccagacagttttccactaagttttccaactagttttccatgcagttttccagtaagttttccaggcgcgccatgcttcatcagactct

SEQ ID NO: 4499 - DNA, 164 bp, Artificial Sequence; identical to SEQ ID NO: 4498
  Synthetic polynucleotide

SEQ ID NO: 4500 - DNA, 172 bp, Artificial Sequence
  Synthetic polynucleotide
atcatctcaccttgcctcctggcccatgaggtgtggatcctgcaggaagaacaatgagaaagaacaatgtcgaagaacaatggacaagaacaatgctaaagaacaatgactaagaacaatgtgcaagaacaatggtaaagaacaatgggcgcgccatgcttcatcagactct

SEQ ID NO: 4501 - DNA, 172 bp, Artificial Sequence; identical to SEQ ID NO: 4500
  Synthetic polynucleotide

SEQ ID NO: 4502 - DNA, 197 bp, Artificial Sequence
  Synthetic polynucleotide
atcatctcaccttgcctcctgtagtgccctcttacgtgcctgcaggaccgcctgaggggatagaaccgcctgaggggattcgaccgcctgaggggatgacaccgcctgaggggatctaaccgcctgaggggatactaccgcctgaggggattgcaccgcctgaggggatgtaggcgcgccatgcttcatcagactct

SEQ ID NO: 4503 - DNA, 197 bp, Artificial Sequence; identical to SEQ ID NO: 4502
  Synthetic polynucleotide

SEQ ID NO: 4504 - DNA, 180 bp, Artificial Sequence
  Synthetic polynucleotide
atcatctcaccttgcctcctgcggcctgcttatcgattcctgcaggctgggttgtgcagactgggttgtgctcgctgggttgtgcgacctgggttgtgcctactgggttgtgcactctgggttgtgctgcctgggttgtgcgtactgggttgtgcggcgcgccatgcttcatcagactct

SEQ ID NO: 4505 - DNA, 180 bp, Artificial Sequence; identical to SEQ ID NO: 4504
  Synthetic polynucleotide

SEQ ID NO: 4506 - DNA, 172 bp, Artificial Sequence
  Synthetic polynucleotide
atcatctcaccttgcctcctgctagcagaacaggtgggcctgcagggcgcatgcgcagagcgcatgcgctcggcgcatgcgcgacgcgcatgcgcctagcgcatgcgcactgcgcatgcgctgcgcgcatgcgcgtagcgcatgcgcggcgcgccatgcttcatcagactct

SEQ ID NO: 4507 - DNA, 172 bp, Artificial Sequence; identical to SEQ ID NO: 4506
  Synthetic polynucleotide

SEQ ID NO: 4508 - DNA, 156 bp, Artificial Sequence
  Synthetic polynucleotide
atcatctcaccttgcctcctgactaaccgttggacgaccctgcaggtcgcgtgaagatcgcgtgatcgtcgcgtgagactcgcgtgactatcgcgtgaacttcgcgtgatgctcgcgtgagtatcgcgtgaggcgcgccatgcttcatcagactct

SEQ ID NO: 4509 - DNA, 156 bp, Artificial Sequence; identical to SEQ ID NO: 4508
  Synthetic polynucleotide

SEQ ID NO: 4510 - DNA, 196 bp, Artificial Sequence
  Synthetic polynucleotide
atcatctcaccttgcctcctgaactggcgccatgagatcctgcagggacaggaagtaacagagacaggaagtaactcggacaggaagtaacgacgacaggaagtaacctagacaggaagtaacactgacaggaagtaactgcgacaggaagtaacgtagacaggaagtaacggcgcgccatgcttcatcagactct

SEQ ID NO: 4511 - DNA, 196 bp, Artificial Sequence; identical to SEQ ID NO: 4510
  Synthetic polynucleotide

SEQ ID NO: 4512 - DNA, 180 bp, Artificial Sequence
  Synthetic polynucleotide
atcatctcaccttgcctcctgatataaggcgcctacgtcctgcaggaagtagtgcccagaaagtagtgccctcgaagtagtgcccgacaagtagtgcccctaaagtagtgcccactaagtagtgccctgcaagtagtgcccgtaaagtagtgcccggcgcgccatgcttcatcagactct

SEQ ID NO: 4513 - DNA, 180 bp, Artificial Sequence; identical to SEQ ID NO: 4512
  Synthetic polynucleotide

SEQ ID NO: 4514 - DNA, 188 bp, Artificial Sequence
  Synthetic polynucleotide
atcatctcaccttgcctcctggattcgagctggtggagcctgcaggactataaatagaagaactataaatagatcgactataaatagagacactataaatagactaactataaatagaactactataaatagatgcactataaatagagtaactataaatagaggcgcgccatgcttcatcagactct

SEQ ID NO: 4515 - DNA, 188 bp, Artificial Sequence; identical to SEQ ID NO: 4514
  Synthetic polynucleotide

SEQ ID NO: 4516 - DNA, 172 bp, Artificial Sequence
  Synthetic polynucleotide
atcatctcaccttgcctcctggcgcggtacaaactcgacctgcagggataattaggagagataattaggtcggataattagggacgataattaggctagataattaggactgataattaggtgcgataattagggtagataattaggggcgcgccatgcttcatcagactct

SEQ ID NO: 4517 - DNA, 172 bp, Artificial Sequence; identical to SEQ ID NO: 4516
  Synthetic polynucleotide

SEQ ID NO: 4518 - DNA, 196 bp, Artificial Sequence
  Synthetic polynucleotide
atcatctcaccttgcctcctgaggtccaaacacggtctcctgcaggttaatttaattatagattaatttaattattcgttaatttaattatgacttaatttaattatctattaatttaattatactttaatttaattattgcttaatttaattatgtattaatttaattatggcgcgccatgcttcatcagactct

SEQ ID NO: 4519 - DNA, 196 bp, Artificial Sequence; identical to SEQ ID NO: 4518
  Synthetic polynucleotide

SEQ ID NO: 4520 - DNA, 197 bp, Artificial Sequence
  Synthetic polynucleotide
atcatctcaccttgcctcctgtcggcgtgtaacggaatcctgcagggtgacctcataaggtcacagagtgacctcataaggtcactcggtgacctcataaggtcacgacgtgacctcataaggtcacctagtgacctcataaggtcacactgtgacctcataaggtcactgcggcgcgccatgcttcatcagactct

SEQ ID NO: 4521 - DNA, 197 bp, Artificial Sequence; identical to SEQ ID NO: 4520
  Synthetic polynucleotide

SEQ ID NO: 4522 - DNA, 172 bp, Artificial Sequence
  Synthetic polynucleotide
atcatctcaccttgcctcctgcaaaggctttatatgcgcctgcaggccacccccccagaccaccccccctcgccacccccccgacccacccccccctaccacccccccactccaccccccctgcccacccccccgtaccacccccccggcgcgccatgcttcatcagactct

SEQ ID NO: 4523 - DNA, 172 bp, Artificial Sequence; identical to SEQ ID NO: 4522
  Synthetic polynucleotide

SEQ ID NO: 4524 - DNA, 164 bp, Artificial Sequence
  Synthetic polynucleotide
atcatctcaccttgcctcctgccgattcccgaacagtacctgcaggggtaattaaagaggtaattaatcgggtaattaagacggtaattaactaggtaattaaactggtaattaatgcggtaattaagtaggtaattaaggcgcgccatgcttcatcagactct

SEQ ID NO: 4525 - DNA, 164 bp, Artificial Sequence; identical to SEQ ID NO: 4524
  Synthetic polynucleotide

SEQ ID NO: 4526 - DNA, 164 bp, Artificial Sequence
  Synthetic polynucleotide
atcatctcaccttgcctcctgtaacgctccaagatagacctgcaggaaaccgcaaagaaaaccgcaatcgaaaccgcaagacaaaccgcaactaaaaccgcaaactaaaccgcaatgcaaaccgcaagtaaaaccgcaaggcgcgccatgcttcatcagactct

SEQ ID NO: 4527 - DNA, 164 bp, Artificial Sequence; identical to SEQ ID NO: 4526
  Synthetic polynucleotide

SEQ ID NO: 4528 - DNA, 156 bp, Artificial Sequence
  Synthetic polynucleotide
atcatctcaccttgcctcctgccgatttaaggtcctctcctgcaggatgacacaagaatgacacatcgatgacacagacatgacacactaatgacacaactatgacacatgcatgacacagtaatgacacaggcgcgccatgcttcatcagactct

SEQ ID NO: 4529 - DNA, 156 bp, Artificial Sequence; identical to SEQ ID NO: 4528
  Synthetic polynucleotide

SEQ ID NO: 4530 - DNA, 180 bp, Artificial Sequence
  Synthetic polynucleotide
atcatctcaccttgcctcctgagattggtggaggttaacctgcaggcgggccggaggagacgggccggaggtcgcgggccggagggaccgggccggaggctacgggccggaggactcgggccggaggtgccgggccggagggtacgggccggaggggcgcgccatgcttcatcagactct

SEQ ID NO: 4531 - DNA, 180 bp, Artificial Sequence; identical to SEQ ID NO: 4530
  Synthetic polynucleotide

SEQ ID NO: 4532 - DNA, 164 bp, Artificial Sequence
  Synthetic polynucleotide
atcatctcaccttgcctcctggtgtttcgtgtagaaatcctgcaggggtaattagagaggtaattagtcgggtaattaggacggtaattagctaggtaattagactggtaattagtgcggtaattaggtaggtaattagggcgcgccatgcttcatcagactct

SEQ ID NO: 4533 - DNA, 164 bp, Artificial Sequence; identical to SEQ ID NO: 4532
  Synthetic polynucleotide

SEQ ID NO: 4534 - DNA, 190 bp, Artificial Sequence
  Synthetic polynucleotide
atcatctcaccttgcctcctgttgtgcccgtcattatacctgcaggattcccttgggaatagaattcccttgggaattcgattcccttgggaatgacattcccttgggaatctaattcccttgggaatactattcccttgggaattgcattcccttgggaatgtaggcgcgccatgcttcatcagactct

SEQ ID NO: 4535 - DNA, 190 bp, Artificial Sequence; identical to SEQ ID NO: 4534
  Synthetic polynucleotide

SEQ ID NO: 4536 - DNA, 180 bp, Artificial Sequence
  Synthetic polynucleotide
atcatctcaccttgcctcctgtcgggaaactagcaactcctgcaggggagtcagcggagaggagtcagcggtcgggagtcagcgggacggagtcagcggctaggagtcagcggactggagtcagcggtgcggagtcagcgggtaggagtcagcggggcgcgccatgcttcatcagactct

SEQ ID NO: 4537 - DNA, 180 bp, Artificial Sequence; identical to SEQ ID NO: 4536
  Synthetic polynucleotide

SEQ ID NO: 4538 - DNA, 190 bp, Artificial Sequence
  Synthetic polynucleotide
atcatctcaccttgcctcctgttacgtaagctttgccacctgcagggttaattacctccaagagttaattacctccatcggttaattacctccagacgttaattacctccactagttaattacctccaactgttaattacctccatgcgttaattacctccagtaggcgcgccatgcttcatcagactct

SEQ ID NO: 4539 - DNA, 190 bp, Artificial Sequence; identical to SEQ ID NO: 4538
  Synthetic polynucleotide

SEQ ID NO: 4540 - DNA, 190 bp, Artificial Sequence
  Synthetic polynucleotide
atcatctcaccttgcctcctgacatgggagggaagagacctgcagggcattatttacatgagagcattatttacatgtcggcattatttacatggacgcattatttacatgctagcattatttacatgactgcattatttacatgtgcgcattatttacatggtaggcgcgccatgcttcatcagactct

SEQ ID NO: 4541 - DNA, 190 bp, Artificial Sequence; identical to SEQ ID NO: 4540
  Synthetic polynucleotide

SEQ ID NO: 4542 - DNA, 191 bp, Artificial Sequence
  Synthetic polynucleotide
atcatctcaccttgcctcctgaacccaatgttctccggcctgcaggaatattgataccctattagaaatattgataccctatttcgaatattgataccctattgacaatattgataccctattctaaatattgataccctattactaatattgataccctatttgcggcgcgccatgcttcatcagactct

SEQ ID NO: 4543 - DNA, 191 bp, Artificial Sequence; identical to SEQ ID NO: 4542
  Synthetic polynucleotide

SEQ ID NO: 4544 - DNA, 197 bp, Artificial Sequence
  Synthetic polynucleotide
atcatctcaccttgcctcctgaggataattaccgcctacctgcaggccaccaccgctattgagaccaccaccgctattgtcgccaccaccgctattggacccaccaccgctattgctaccaccaccgctattgactccaccaccgctattgtgcccaccaccgctattggtaggcgcgccatgcttcatcagactct

SEQ ID NO: 4545 - DNA, 197 bp, Artificial Sequence; identical to SEQ ID NO: 4544
  Synthetic polynucleotide

SEQ ID NO: 4546 - DNA, 148 bp, Artificial Sequence
  Synthetic polynucleotide
atcatctcaccttgcctcctgttgcgtcgtacagcttacctgcagggcaattaagagcaattatcggcaattagacgcaattactagcaattaactgcaattatgcgcaattagtagcaattaggcgcgccatgcttcatcagactct

SEQ ID NO: 4547 - DNA, 148 bp, Artificial Sequence; identical to SEQ ID NO: 4546
  Synthetic polynucleotide

SEQ ID NO: 4548 - DNA, 172 bp, Artificial Sequence
  Synthetic polynucleotide
atcatctcaccttgcctcctgaacggacaggcttaaaccctgcagggaaagaacagagagaaagaacagtcggaaagaacaggacgaaagaacagctagaaagaacagactgaaagaacagtgcgaaagaacaggtagaaagaacagggcgcgccatgcttcatcagactct

SEQ ID NO: 4549 - DNA, 172 bp, Artificial Sequence; identical to SEQ ID NO: 4548
  Synthetic polynucleotide

SEQ ID NO: 4550 - DNA, 191 bp, Artificial Sequence
  Synthetic polynucleotide
atcatctcaccttgcctcctgtttgtgaaactaacgcgcctgcaggtgacctttgagtgacctagatgacctttgagtgaccttcgtgacctttgagtgacctgactgacctttgagtgacctctatgacctttgagtgacctacttgacctttgagtgaccttgcggcgcgccatgcttcatcagactct

SEQ ID NO: 4551 - DNA, 191 bp, Artificial Sequence; identical to SEQ ID NO: 4550
  Synthetic polynucleotide

SEQ ID NO: 4552 - DNA, 180 bp, Artificial Sequence
  Synthetic polynucleotide
atcatctcaccttgcctcctggccagttatacacgcaccctgcaggggcacgtgccaagaggcacgtgccatcgggcacgtgccagacggcacgtgccactaggcacgtgccaactggcacgtgccatgcggcacgtgccagtaggcacgtgccaggcgcgccatgcttcatcagactct

SEQ ID NO: 4553 - DNA, 180 bp, Artificial Sequence; identical to SEQ ID NO: 4552
  Synthetic polynucleotide

SEQ ID NO: 4554 - DNA, 196 bp, Artificial Sequence
  Synthetic polynucleotide
atcatctcaccttgcctcctgttccaccatgaagtacgcctgcagggtgacctttgaccagagtgacctttgacctcggtgacctttgaccgacgtgacctttgaccctagtgacctttgaccactgtgacctttgacctgcgtgacctttgaccgtagtgacctttgaccggcgcgccatgcttcatcagactct

SEQ ID NO: 4555 - DNA, 196 bp, Artificial Sequence; identical to SEQ ID NO: 4554
  Synthetic polynucleotide

SEQ ID NO: 4556 - DNA, 172 bp, Artificial Sequence
  Synthetic polynucleotide
atcatctcaccttgcctcctgatatgaaactgttcgagcctgcagggacacgtgccagagacacgtgcctcggacacgtgccgacgacacgtgccctagacacgtgccactgacacgtgcctgcgacacgtgccgtagacacgtgccggcgcgccatgcttcatcagactct

SEQ ID NO: 4557 - DNA, 172 bp, Artificial Sequence; identical to SEQ ID NO: 4556
  Synthetic polynucleotide

SEQ ID NO: 4558 - DNA, 197 bp, Artificial Sequence
  Synthetic polynucleotide
atcatctcaccttgcctcctgcataatgatactccaagcctgcaggaaggtcaagcaaaggtcaagaaaggtcaagcaaaggtcatcgaaggtcaagcaaaggtcagacaaggtcaagcaaaggtcactaaaggtcaagcaaaggtcaactaaggtcaagcaaaggtcatgcggcgcgccatgcttcatcagactct

SEQ ID NO: 4559 - DNA, 197 bp, Artificial Sequence; identical to SEQ ID NO: 4558
  Synthetic polynucleotide

SEQ ID NO: 4560 - DNA, 190 bp, Artificial Sequence
  Synthetic polynucleotide
atcatctcaccttgcctcctgaacggaggcattaggaccctgcaggtgacttattgacttagatgacttattgactttcgtgacttattgacttgactgacttattgacttctatgacttattgacttacttgacttattgactttgctgacttattgacttgtaggcgcgccatgcttcatcagactct

SEQ ID NO: 4561 - DNA, 190 bp, Artificial Sequence; identical to SEQ ID NO: 4560
  Synthetic polynucleotide

SEQ ID NO: 4562 - DNA, 197 bp, Artificial Sequence
  Synthetic polynucleotide
atcatctcaccttgcctcctggccttaagcgtggattgcctgcaggcagcaccatggacagagacagcaccatggacagtcgcagcaccatggacaggaccagcaccatggacagctacagcaccatggacagactcagcaccatggacagtgccagcaccatggacaggtaggcgcgccatgcttcatcagactct

SEQ ID NO: 4563 - DNA, 197 bp, Artificial Sequence; identical to SEQ ID NO: 4562
  Synthetic polynucleotide

SEQ ID NO: 4564 - DNA, 197 bp, Artificial Sequence
  Synthetic polynucleotide
atcatctcaccttgcctcctgtggtacatttgacctatcctgcaggatttctcaggaaatgagaatttctcaggaaatgtcgatttctcaggaaatggacatttctcaggaaatgctaatttctcaggaaatgactatttctcaggaaatgtgcatttctcaggaaatggtaggcgcgccatgcttcatcagactct

SEQ ID NO: 4565 - DNA, 197 bp, Artificial Sequence; identical to SEQ ID NO: 4564
  Synthetic polynucleotide

SEQ ID NO: 4566 - DNA, 180 bp, Artificial Sequence
  Synthetic polynucleotide
atcatctcaccttgcctcctgggatataacgaaccctacctgcaggatgactcagcaagaatgactcagcatcgatgactcagcagacatgactcagcactaatgactcagcaactatgactcagcatgcatgactcagcagtaatgactcagcaggcgcgccatgcttcatcagactct

SEQ ID NO: 4567 - DNA, 180 bp, Artificial Sequence; identical to SEQ ID NO: 4566
  Synthetic polynucleotide

SEQ ID NO: 4568 - DNA, 164 bp, Artificial Sequence
  Synthetic polynucleotide
atcatctcaccttgcctcctgcaattctcaacgggccacctgcagggacacgtgcagagacacgtgctcggacacgtgcgacgacacgtgcctagacacgtgcactgacacgtgctgcgacacgtgcgtagacacgtgcggcgcgccatgcttcatcagactct

SEQ ID NO: 4569 - DNA, 164 bp, Artificial Sequence; identical to SEQ ID NO: 4568
  Synthetic polynucleotide

SEQ ID NO: 4570 - DNA, 197 bp, Artificial Sequence
  Synthetic polynucleotide
atcatctcaccttgcctcctgtagtggccgcatagacccctgcaggccgtcacgcaccaatagaccgtcacgcaccaattcgccgtcacgcaccaatgacccgtcacgcaccaatctaccgtcacgcaccaatactccgtcacgcaccaattgcccgtcacgcaccaatgtaggcgcgccatgcttcatcagactct

SEQ ID NO: 4571 - DNA, 197 bp, Artificial Sequence; identical to SEQ ID NO: 4570
  Synthetic polynucleotide

SEQ ID NO: 4572 - DNA, 188 bp, Artificial Sequence
  Synthetic polynucleotide
atcatctcaccttgcctcctgttggacctctcttgcggcctgcaggttacatgacatgagattacatgacatgtcgttacatgacatggacttacatgacatgctattacatgacatgactttacatgacatgtgcttacatgacatggtattacatgacatgggcgcgccatgcttcatcagactct

SEQ ID NO: 4573 - DNA, 188 bp, Artificial Sequence; identical to SEQ ID NO: 4572
  Synthetic polynucleotide

SEQ ID NO: 4574 - DNA, 185 bp, Artificial Sequence
  Synthetic polynucleotide
atcatctcaccttgcctcctgcaaagtcagcgtagctacctgcaggacgttaattaacccagagaacgttaattaacccagtcgacgttaattaacccaggacacgttaattaacccagctaacgttaattaacccagactacgttaattaacccagtgcggcgcgccatgcttcatcagactct

SEQ ID NO: 4575 - DNA, 185 bp, Artificial Sequence; identical to SEQ ID NO: 4574
  Synthetic polynucleotide

SEQ ID NO: 4576 - DNA, 188 bp, Artificial Sequence
  Synthetic polynucleotide
atcatctcaccttgcctcctggtgatagagtaatgtgccctgcagggggggatttcccagagggggatttccctcggggggatttcccgacgggggatttcccctagggggatttcccactgggggatttccctgcgggggatttcccgtagggggatttcccggcgcgccatgcttcatcagactct

SEQ ID NO: 4577 - DNA, 188 bp, Artificial Sequence; identical to SEQ ID NO: 4576
  Synthetic polynucleotide

SEQ ID NO: 4578 - DNA, 188 bp, Artificial Sequence
  Synthetic polynucleotide
atcatctcaccttgcctcctggctaaggatgtactgaccctgcaggtctatttatagtagatctatttatagttcgtctatttatagtgactctatttatagtctatctatttatagtacttctatttatagttgctctatttatagtgtatctatttatagtggcgcgccatgcttcatcagactct

SEQ ID NO: 4579 - DNA, 188 bp, Artificial Sequence; identical to SEQ ID NO: 4578
  Synthetic polynucleotide

SEQ ID NO: 4580 - DNA, 164 bp, Artificial Sequence
  Synthetic polynucleotide
atcatctcaccttgcctcctgaaccatggcgaaatcgtcctgcaggacacgtgccagaacacgtgcctcgacacgtgccgacacacgtgccctaacacgtgccactacacgtgcctgcacacgtgccgtaacacgtgccggcgcgccatgcttcatcagactct

SEQ ID NO: 4581 - DNA, 164 bp, Artificial Sequence; identical to SEQ ID NO: 4580
  Synthetic polynucleotide

SEQ ID NO: 4582 - DNA, 186 bp, Artificial Sequence
  Synthetic polynucleotide
atcatctcaccttgcctcctgtggtagggccaaaggagcctgcaggttaaaagtaaacaaagatgaagattaaaagtaaacaaagatgatcgttaaaagtaaacaaagatgagacttaaaagtaaacaaagatgactattaaaagtaaacaaagatgaactggcgcgccatgcttcatcagactct

SEQ ID NO: 4583 - DNA, 186 bp, Artificial Sequence; identical to SEQ ID NO: 4582
  Synthetic polynucleotide

SEQ ID NO: 4584 - DNA, 172 bp, Artificial Sequence
  Synthetic polynucleotide
atcatctcaccttgcctcctgagagtttgttctgcccacctgcaggcgttgctatgagacgttgctatgtcgcgttgctatggaccgttgctatgctacgttgctatgactcgttgctatgtgccgttgctatggtacgttgctatgggcgcgccatgcttcatcagactct

SEQ ID NO: 4585 - DNA, 172 bp, Artificial Sequence; identical to SEQ ID NO: 4584
  Synthetic polynucleotide

SEQ ID NO: 4586 - DNA, 196 bp, Artificial Sequence
  Synthetic polynucleotide
atcatctcaccttgcctcctggtacgagctactttattcctgcaggtgacctttgacccagatgacctttgaccctcgtgacctttgacccgactgacctttgacccctatgacctttgacccacttgacctttgaccctgctgacctttgacccgtatgacctttgacccggcgcgccatgcttcatcagactct

SEQ ID NO: 4587 - DNA, 196 bp, Artificial Sequence; identical to SEQ ID NO: 4586
  Synthetic polynucleotide

SEQ ID NO: 4588 - DNA, 164 bp, Artificial Sequence
  Synthetic polynucleotide
atcatctcaccttgcctcctgccttcttgaccctgacgcctgcaggaggaaatgaagaaggaaatgatcgaggaaatgagacaggaaatgactaaggaaatgaactaggaaatgatgcaggaaatgagtaaggaaatgaggcgcgccatgcttcatcagactct

SEQ ID NO: 4589 - DNA, 164 bp, Artificial Sequence; identical to SEQ ID NO: 4588
  Synthetic polynucleotide

SEQ ID NO: 4590 - DNA, 191 bp, Artificial Sequence
  Synthetic polynucleotide
atcatctcaccttgcctcctgatgggataaagatccatcctgcaggtaaggtcgtaaaatcctagataaggtcgtaaaatccttcgtaaggtcgtaaaatcctgactaaggtcgtaaaatcctctataaggtcgtaaaatcctacttaaggtcgtaaaatccttgcggcgcgccatgcttcatcagactct

SEQ ID NO: 4591 - DNA, 191 bp, Artificial Sequence; identical to SEQ ID NO: 4590
  Synthetic polynucleotide

SEQ ID NO: 4592 - DNA, 164 bp, Artificial Sequence
  Synthetic polynucleotide
atcatctcaccttgcctcctggacctttgcggcagtatcctgcaggtaggtcaccagataggtcacctcgtaggtcaccgactaggtcaccctataggtcaccacttaggtcacctgctaggtcaccgtataggtcaccggcgcgccatgcttcatcagactct

SEQ ID NO: 4593 - DNA, 164 bp, Artificial Sequence; identical to SEQ ID NO: 4592
  Synthetic polynucleotide

SEQ ID NO: 4594 - DNA, 190 bp, Artificial Sequence
  Synthetic polynucleotide
atcatctcaccttgcctcctgtcgactttatagtgtagcctgcaggggaacattctgttcagaggaacattctgttctcgggaacattctgttcgacggaacattctgttcctaggaacattctgttcactggaacattctgttctgcggaacattctgttcgtaggcgcgccatgcttcatcagactct

SEQ ID NO: 4595 - DNA, 190 bp, Artificial Sequence; identical to SEQ ID NO: 4594
  Synthetic polynucleotide

SEQ ID NO: 4596 - DNA, 185 bp, Artificial Sequence
  Synthetic polynucleotide
atcatctcaccttgcctcctgatcttctcataggctcccctgcagggtactaattagtggcgagagtactaattagtggcgtcggtactaattagtggcggacgtactaattagtggcgctagtactaattagtggcgactgtactaattagtggcgtgcggcgcgccatgcttcatcagactct

SEQ ID NO: 4597 - DNA, 185 bp, Artificial Sequence; identical to SEQ ID NO: 4596
  Synthetic polynucleotide

SEQ ID NO: 4598 - DNA, 164 bp, Artificial Sequence
  Synthetic polynucleotide
atcatctcaccttgcctcctggctcctagtgaaccaaacctgcaggtccgcccccagatccgccccctcgtccgcccccgactccgcccccctatccgcccccacttccgccccctgctccgcccccgtatccgcccccggcgcgccatgcttcatcagactct

SEQ ID NO: 4599 - DNA, 164 bp, Artificial Sequence; identical to SEQ ID NO: 4598
  Synthetic polynucleotide

SEQ ID NO: 4600 - DNA, 156 bp, Artificial Sequence
  Synthetic polynucleotide
atcatctcaccttgcctcctgctatggctctcgaccctcctgcagggcgggaaaagagcgggaaatcggcgggaaagacgcgggaaactagcgggaaaactgcgggaaatgcgcgggaaagtagcgggaaaggcgcgccatgcttcatcagactct

SEQ ID NO: 4601 - DNA, 156 bp, Artificial Sequence; identical to SEQ ID NO: 4600
  Synthetic polynucleotide

SEQ ID NO: 4602 - DNA, 180 bp, Artificial Sequence
  Synthetic polynucleotide
atcatctcaccttgcctcctgcacgtagtcaaacgtcccctgcaggaagaggattagagaaagaggattagtcgaagaggattaggacaagaggattagctaaagaggattagactaagaggattagtgcaagaggattaggtaaagaggattagggcgcgccatgcttcatcagactct

SEQ ID NO: 4603 - DNA, 180 bp, Artificial Sequence; identical to SEQ ID NO: 4602
  Synthetic polynucleotide

SEQ ID NO: 4604 - DNA, 180 bp, Artificial Sequence
  Synthetic polynucleotide
atcatctcaccttgcctcctgcagctcgcacattagggcctgcagggccacgcccccagagccacgccccctcggccacgcccccgacgccacgcccccctagccacgcccccactgccacgccccctgcgccacgcccccgtagccacgcccccggcgcgccatgcttcatcagactct

SEQ ID NO: 4605 - DNA, 180 bp, Artificial Sequence; identical to SEQ ID NO: 4604
  Synthetic polynucleotide

SEQ ID NO: 4606 - DNA, 196 bp, Artificial Sequence
  Synthetic polynucleotide
atcatctcaccttgcctcctgtcaacctaacggagccgcctgcaggcctcaccccacccagacctcaccccaccctcgcctcaccccacccgaccctcaccccacccctacctcaccccacccactcctcaccccaccctgccctcaccccacccgtacctcaccccacccggcgcgccatgcttcatcagactct

SEQ ID NO: 4607 - DNA, 196 bp, Artificial Sequence; identical to SEQ ID NO: 4606
  Synthetic polynucleotide

SEQ ID NO: 4608 - DNA, 196 bp, Artificial Sequence
  Synthetic polynucleotide
atcatctcaccttgcctcctggctccgggtaatgagtacctgcaggtgacctttgacctagatgacctttgaccttcgtgacctttgacctgactgacctttgacctctatgacctttgacctacttgacctttgaccttgctgacctttgacctgtatgacctttgacctggcgcgccatgcttcatcagactct

SEQ ID NO: 4609 - DNA, 196 bp, Artificial Sequence; identical to SEQ ID NO: 4608
  Synthetic polynucleotide

SEQ ID NO: 4610 - DNA, 172 bp, Artificial Sequence
  Synthetic polynucleotide
atcatctcaccttgcctcctgcgcccattgcttcagagcctgcaggccacttaagaagaccacttaagatcgccacttaagagacccacttaagactaccacttaagaactccacttaagatgcccacttaagagtaccacttaagaggcgcgccatgcttcatcagactct

SEQ ID NO: 4611 - DNA, 172 bp, Artificial Sequence; identical to SEQ ID NO: 4610
  Synthetic polynucleotide

SEQ ID NO: 4612 - DNA, 197 bp, Artificial Sequence
  Synthetic polynucleotide
atcatctcaccttgcctcctgctgttagcatccacgaccctgcaggaaggtcaaaaggtcaagaaaggtcaaaaggtcatcgaaggtcaaaaggtcagacaaggtcaaaaggtcactaaaggtcaaaaggtcaactaaggtcaaaaggtcatgcaaggtcaaaaggtcagtaggcgcgccatgcttcatcagactct

SEQ ID NO: 4613 - DNA, 197 bp, Artificial Sequence; identical to SEQ ID NO: 4612
  Synthetic polynucleotide

SEQ ID NO: 4614 - DNA, 196 bp, Artificial Sequence
  Synthetic polynucleotide
atcatctcaccttgcctcctgttcaagggccagagaatcctgcaggtacacttcccagaatgccttgcagatacacttcccagaatgccttgctcgtacacttcccagaatgccttgcgactacacttcccagaatgccttgcctatacacttcccagaatgccttgcactggcgcgccatgcttcatcagactct

SEQ ID NO: 4615 - DNA, 196 bp, Artificial Sequence; identical to SEQ ID NO: 4614
  Synthetic polynucleotide

SEQ ID NO: 4616 - DNA, 197 bp, Artificial Sequence
  Synthetic polynucleotide
atcatctcaccttgcctcctgtgaggcaccaggtaagtcctgcaggggtcacgtgaccgggagaggtcacgtgaccgggtcgggtcacgtgaccggggacggtcacgtgaccgggctaggtcacgtgaccgggactggtcacgtgaccgggtgcggtcacgtgaccggggtaggcgcgccatgcttcatcagactct

SEQ ID NO: 4617 - DNA, 197 bp, Artificial Sequence; identical to SEQ ID NO: 4616
  Synthetic polynucleotide

SEQ ID NO: 4618 - DNA, 180 bp, Artificial Sequence
  Synthetic polynucleotide
atcatctcaccttgcctcctgcctgaacctgtagtacccctgcaggaccatatggcgagaaccatatggcgtcgaccatatggcggacaccatatggcgctaaccatatggcgactaccatatggcgtgcaccatatggcggtaaccatatggcgggcgcgccatgcttcatcagactct

SEQ ID NO: 4619 - DNA, 180 bp, Artificial Sequence; identical to SEQ ID NO: 4618
  Synthetic polynucleotide

SEQ ID NO: 4620 - DNA, 197 bp, Artificial Sequence
  Synthetic polynucleotide
atcatctcaccttgcctcctgattctctcacggtccttcctgcaggcttaagtaaacaacgagacttaagtaaacaacgtcgcttaagtaaacaacggaccttaagtaaacaacgctacttaagtaaacaacgactcttaagtaaacaacgtgccttaagtaaacaacggtaggcgcgccatgcttcatcagactct

SEQ ID NO: 4621 - DNA, 197 bp, Artificial Sequence; identical to SEQ ID NO: 4620
  Synthetic polynucleotide

SEQ ID NO: 4622 - DNA, 188 bp, Artificial Sequence
  Synthetic polynucleotide
atcatctcaccttgcctcctggttagcggccgtcctaacctgcaggtgattgcaatcaagatgattgcaatcatcgtgattgcaatcagactgattgcaatcactatgattgcaatcaacttgattgcaatcatgctgattgcaatcagtatgattgcaatcaggcgcgccatgcttcatcagactct

SEQ ID NO: 4623 - DNA, 188 bp, Artificial Sequence; identical to SEQ ID NO: 4622
  Synthetic polynucleotide

SEQ ID NO: 4624 - DNA, 190 bp, Artificial Sequence
  Synthetic polynucleotide
atcatctcaccttgcctcctgagtaaccgcagtttcaacctgcaggcgatgacgtcagagagacgatgacgtcagagtcgcgatgacgtcagaggaccgatgacgtcagagctacgatgacgtcagagactcgatgacgtcagagtgccgatgacgtcagaggtaggcgcgccatgcttcatcagactct

SEQ ID NO: 4625 - DNA, 190 bp, Artificial Sequence; identical to SEQ ID NO: 4624
  Synthetic polynucleotide

SEQ ID NO: 4626 - DNA, 156 bp, Artificial Sequence
  Synthetic polynucleotide
atcatctcaccttgcctcctgccgagtcagtctggttgcctgcaggtgtttacaagatgtttacatcgtgtttacagactgtttacactatgtttacaacttgtttacatgctgtttacagtatgtttacaggcgcgccatgcttcatcagactct

SEQ ID NO: 4627 - DNA, 156 bp, Artificial Sequence; identical to SEQ ID NO: 4626
  Synthetic polynucleotide

SEQ ID NO: 4628 - DNA, 185 bp, Artificial Sequence
  Synthetic polynucleotide
atcatctcaccttgcctcctggttgatccggtggtgaacctgcaggatccggcacgtggcctagaatccggcacgtggccttcgatccggcacgtggcctgacatccggcacgtggcctctaatccggcacgtggcctactatccggcacgtggccttgcggcgcgccatgcttcatcagactct

SEQ ID NO: 4629 - DNA, 185 bp, Artificial Sequence; identical to SEQ ID NO: 4628
  Synthetic polynucleotide

SEQ ID NO: 4630 - DNA, 196 bp, Artificial Sequence
  Synthetic polynucleotide
atcatctcaccttgcctcctgcgctctaaatttgggcacctgcaggaattcccagaaaaagaaattcccagaaaatcgaattcccagaaaagacaattcccagaaaactaaattcccagaaaaactaattcccagaaaatgcaattcccagaaaagtaaattcccagaaaaggcgcgccatgcttcatcagactct

SEQ ID NO: 4631 - DNA, 196 bp, Artificial Sequence; identical to SEQ ID NO: 4630
  Synthetic polynucleotide

SEQ ID NO: 4632 - DNA, 191 bp, Artificial Sequence
  Synthetic polynucleotide
atcatctcaccttgcctcctgtagtggctgtctatgtgcctgcaggtgaattcctagaaagcaagatgaattcctagaaagcatcgtgaattcctagaaagcagactgaattcctagaaagcactatgaattcctagaaagcaacttgaattcctagaaagcatgcggcgcgccatgcttcatcagactct

SEQ ID NO: 4633 - DNA, 191 bp, Artificial Sequence; identical to SEQ ID NO: 4632
  Synthetic polynucleotide

SEQ ID NO: 4634 - DNA, 188 bp, Artificial Sequence
  Synthetic polynucleotide
atcatctcaccttgcctcctgtttataataccaggagccctgcaggtgtaaacaaattagatgtaaacaaatttcgtgtaaacaaattgactgtaaacaaattctatgtaaacaaattacttgtaaacaaatttgctgtaaacaaattgtatgtaaacaaattggcgcgccatgcttcatcagactct

SEQ ID NO: 4635 - DNA, 188 bp, Artificial Sequence; identical to SEQ ID NO: 4634
  Synthetic polynucleotide

SEQ ID NO: 4636 - DNA, 188 bp, Artificial Sequence
  Synthetic polynucleotide
atcatctcaccttgcctcctggaatgtgagtgagatcccctgcaggctgaccttgaacagactgaccttgaactcgctgaccttgaacgacctgaccttgaacctactgaccttgaacactctgaccttgaactgcctgaccttgaacgtactgaccttgaacggcgcgccatgcttcatcagactct

SEQ ID NO: 4637 - DNA, 188 bp, Artificial Sequence; identical to SEQ ID NO: 4636
  Synthetic polynucleotide

SEQ ID NO: 4638 - DNA, 191 bp, Artificial Sequence
  Synthetic polynucleotide
atcatctcaccttgcctcctgcgcacatccttatcgaacctgcaggactttggtttcgatcagagaactttggtttcgatcagtcgactttggtttcgatcaggacactttggtttcgatcagctaactttggtttcgatcagactactttggtttcgatcagtgcggcgcgccatgcttcatcagactct

SEQ ID NO: 4639 - DNA, 191 bp, Artificial Sequence; identical to SEQ ID NO: 4638
  Synthetic polynucleotide

SEQ ID NO: 4640 - DNA, 180 bp, Artificial Sequence
  Synthetic polynucleotide
atcatctcaccttgcctcctgcaccatattcccgtgagcctgcaggcggacacaatcagacggacacaatctcgcggacacaatcgaccggacacaatcctacggacacaatcactcggacacaatctgccggacacaatcgtacggacacaatcggcgcgccatgcttcatcagactct

SEQ ID NO: 4641 - DNA, 180 bp, Artificial Sequence; identical to SEQ ID NO: 4640
  Synthetic polynucleotide

SEQ ID NO: 4642 - DNA, 197 bp, Artificial Sequence
  Synthetic polynucleotide
atcatctcaccttgcctcctgtatacgacgacgtctcccctgcaggttgctatttttagcaagattgctatttttagcatcgttgctatttttagcagacttgctatttttagcactattgctatttttagcaactttgctatttttagcatgcttgctatttttagcagtaggcgcgccatgcttcatcagactct

SEQ ID NO: 4643 - DNA, 197 bp, Artificial Sequence; identical to SEQ ID NO: 4642
  Synthetic polynucleotide

SEQ ID NO: 4644 - DNA, 191 bp, Artificial Sequence
  Synthetic polynucleotide
atcatctcaccttgcctcctgacaaccactttctcaagcctgcagggggtacaccgtgttcccagagggtacaccgtgttccctcggggtacaccgtgttcccgacgggtacaccgtgttcccctagggtacaccgtgttcccactgggtacaccgtgttccctgcggcgcgccatgcttcatcagactct

SEQ ID NO: 4645 - DNA, 191 bp, Artificial Sequence; identical to SEQ ID NO: 4644
  Synthetic polynucleotide

SEQ ID NO: 4646 - DNA, 197 bp, Artificial Sequence
  Synthetic polynucleotide
atcatctcaccttgcctcctgactgcacttggtactgccctgcaggcattgcctcagggcaagacattgcctcagggcatcgcattgcctcagggcagaccattgcctcagggcactacattgcctcagggcaactcattgcctcagggcatgccattgcctcagggcagtaggcgcgccatgcttcatcagactct

SEQ ID NO: 4647 - DNA, 197 bp, Artificial Sequence; identical to SEQ ID NO: 4646
  Synthetic polynucleotide

SEQ ID NO: 4648 - DNA, 180 bp, Artificial Sequence
  Synthetic polynucleotide
atcatctcaccttgcctcctgctttgccgtagcaggaccctgcaggaagccataaaaagaaagccataaaatcgaagccataaaagacaagccataaaactaaagccataaaaactaagccataaaatgcaagccataaaagtaaagccataaaaggcgcgccatgcttcatcagactct

SEQ ID NO: 4649 - DNA, 180 bp, Artificial Sequence; identical to SEQ ID NO: 4648
  Synthetic polynucleotide

SEQ ID NO: 4650 - DNA, 180 bp, Artificial Sequence
  Synthetic polynucleotide
atcatctcaccttgcctcctggatgcaaagtcggccgtcctgcaggtttttacgaccagatttttacgacctcgtttttacgaccgactttttacgaccctatttttacgaccacttttttacgacctgctttttacgaccgtatttttacgaccggcgcgccatgcttcatcagactct

SEQ ID NO: 4651 - DNA, 180 bp, Artificial Sequence; identical to SEQ ID NO: 4650
  Synthetic polynucleotide

SEQ ID NO: 4652 - DNA, 190 bp, Artificial Sequence
  Synthetic polynucleotide
atcatctcaccttgcctcctgggagagttcctgaatcgcctgcaggaaccgttaaccgttagaaaccgttaaccgtttcgaaccgttaaccgttgacaaccgttaaccgttctaaaccgttaaccgttactaaccgttaaccgtttgcaaccgttaaccgttgtaggcgcgccatgcttcatcagactct

SEQ ID NO: 4653 - DNA, 190 bp, Artificial Sequence; identical to SEQ ID NO: 4652
  Synthetic polynucleotide

SEQ ID NO: 4654 - DNA, 180 bp, Artificial Sequence
  Synthetic polynucleotide
atcatctcaccttgcctcctgagccggtcaaggatatacctgcaggccagcgcccgcagaccagcgcccgctcgccagcgcccgcgacccagcgcccgcctaccagcgcccgcactccagcgcccgctgcccagcgcccgcgtaccagcgcccgcggcgcgccatgcttcatcagactct

SEQ ID NO: 4655 - DNA, 180 bp, Artificial Sequence; identical to SEQ ID NO: 4654
  Synthetic polynucleotide

SEQ ID NO: 4656 - DNA, 190 bp, Artificial Sequence
  Synthetic polynucleotide
atcatctcaccttgcctcctgttctttaagctactgagcctgcaggatttcctgtttgccagaatttcctgtttgcctcgatttcctgtttgccgacatttcctgtttgccctaatttcctgtttgccactatttcctgtttgcctgcatttcctgtttgccgtaggcgcgccatgcttcatcagactct

SEQ ID NO: 4657 - DNA, 190 bp, Artificial Sequence; identical to SEQ ID NO: 4656
  Synthetic polynucleotide

SEQ ID NO: 4658 - DNA, 197 bp, Artificial Sequence
  Synthetic polynucleotide
atcatctcaccttgcctcctgttacagtgtatgacttgcctgcaggtgaaatatttatttaagatgaaatatttatttatcgtgaaatatttatttagactgaaatatttatttactatgaaatatttatttaacttgaaatatttatttatgctgaaatatttatttagtaggcgcgccatgcttcatcagactct

SEQ ID NO: 4659 - DNA, 197 bp, Artificial Sequence; identical to SEQ ID NO: 4658
  Synthetic polynucleotide

SEQ ID NO: 4660 - DNA, 197 bp, Artificial Sequence
  Synthetic polynucleotide
atcatctcaccttgcctcctgattcgagaccgggcagtcctgcaggttcgaacggttcgaaagattcgaacggttcgaatcgttcgaacggttcgaagacttcgaacggttcgaactattcgaacggttcgaaactttcgaacggttcgaatgcttcgaacggttcgaagtaggcgcgccatgcttcatcagactct

SEQ ID NO: 4661 - DNA, 197 bp, Artificial Sequence; identical to SEQ ID NO: 4660
  Synthetic polynucleotide

SEQ ID NO: 4662 - DNA, 156 bp, Artificial Sequence
  Synthetic polynucleotide
atcatctcaccttgcctcctgttgacgtacatcctgtacctgcaggtttcgcaaagatttcgcaatcgtttcgcaagactttcgcaactatttcgcaaacttttcgcaatgctttcgcaagtatttcgcaaggcgcgccatgcttcatcagactct

SEQ ID NO: 4663 - DNA, 156 bp, Artificial Sequence; identical to SEQ ID NO: 4662
  Synthetic polynucleotide

SEQ ID NO: 4664 - DNA, 190 bp, Artificial Sequence
  Synthetic polynucleotide
atcatctcaccttgcctcctgccgtctcacgattcaagcctgcagggaccacccacgacgagagaccacccacgacgtcggaccacccacgacggacgaccacccacgacgctagaccacccacgacgactgaccacccacgacgtgcgaccacccacgacggtaggcgcgccatgcttcatcagactct

SEQ ID NO: 4665 - DNA, 190 bp, Artificial Sequence; identical to SEQ ID NO: 4664
  Synthetic polynucleotide

SEQ ID NO: 4666 - DNA, 196 bp, Artificial Sequence
  Synthetic polynucleotide
atcatctcaccttgcctcctgttatcatgcagtagtgccctgcaggtgtttatgtttacagatgtttatgtttactcgtgtttatgtttacgactgtttatgtttacctatgtttatgtttacacttgtttatgtttactgctgtttatgtttacgtatgtttatgtttacggcgcgccatgcttcatcagactct

SEQ ID NO: 4667 - DNA, 196 bp, Artificial Sequence; identical to SEQ ID NO: 4666
  Synthetic polynucleotide

SEQ ID NO: 4668 - DNA, 172 bp, Artificial Sequence
  Synthetic polynucleotide
atcatctcaccttgcctcctgtgcatactatccgatctcctgcaggacctggtggcagaacctggtggctcgacctggtggcgacacctggtggcctaacctggtggcactacctggtggctgcacctggtggcgtaacctggtggcggcgcgccatgcttcatcagactct

SEQ ID NO: 4669 - DNA, 172 bp, Artificial Sequence; identical to SEQ ID NO: 4668
  Synthetic polynucleotide

SEQ ID NO: 4670 - DNA, 172 bp, Artificial Sequence
  Synthetic polynucleotide
atcatctcaccttgcctcctgtacataaggcatccgagcctgcagggttaattaccagagttaattacctcggttaattaccgacgttaattaccctagttaattaccactgttaattacctgcgttaattaccgtagttaattaccggcgcgccatgcttcatcagactct

SEQ ID NO: 4671 - DNA, 172 bp, Artificial Sequence; identical to SEQ ID NO: 4670
  Synthetic polynucleotide

SEQ ID NO: 4672 - DNA, 190 bp, Artificial Sequence
  Synthetic polynucleotide
atcatctcaccttgcctcctgatcgttgtccgacgtcacctgcaggtaattgaccaattaagataattgaccaattatcgtaattgaccaattagactaattgaccaattactataattgaccaattaacttaattgaccaattatgctaattgaccaattagtaggcgcgccatgcttcatcagactct

SEQ ID NO: 4673 - DNA, 190 bp, Artificial Sequence; identical to SEQ ID NO: 4672
  Synthetic polynucleotide

SEQ ID NO: 4674 - DNA, 148 bp, Artificial Sequence
  Synthetic polynucleotide
atcatctcaccttgcctcctgtcccacaccagcatgcacctgcaggtacgtaaagatacgtaatcgtacgtaagactacgtaactatacgtaaacttacgtaatgctacgtaagtatacgtaaggcgcgccatgcttcatcagactct

SEQ ID NO: 4675 - DNA, 148 bp, Artificial Sequence; identical to SEQ ID NO: 4674
  Synthetic polynucleotide

SEQ ID NO: 4676 - DNA, 156 bp, Artificial Sequence
  Synthetic polynucleotide
atcatctcaccttgcctcctgtggatcagcacctgggacctgcaggtcacgtgtagatcacgtgttcgtcacgtgtgactcacgtgtctatcacgtgtacttcacgtgttgctcacgtgtgtatcacgtgtggcgcgccatgcttcatcagactct

SEQ ID NO: 4677 - DNA, 156 bp, Artificial Sequence; identical to SEQ ID NO: 4676
  Synthetic polynucleotide

SEQ ID NO: 4678 - DNA, 185 bp, Artificial Sequence
  Synthetic polynucleotide
atcatctcaccttgcctcctgcacatccggtgagttcgcctgcagggttgtcacgtgcccgcagagttgtcacgtgcccgctcggttgtcacgtgcccgcgacgttgtcacgtgcccgcctagttgtcacgtgcccgcactgttgtcacgtgcccgctgcggcgcgccatgcttcatcagactct

SEQ ID NO: 4679 - DNA, 185 bp, Artificial Sequence; identical to SEQ ID NO: 4678
  Synthetic polynucleotide

SEQ ID NO: 4680 - DNA, 156 bp, Artificial Sequence
  Synthetic polynucleotide
atcatctcaccttgcctcctgtagctgatacggtcgttcctgcaggggattaatagaggattaattcgggattaatgacggattaatctaggattaatactggattaattgcggattaatgtaggattaatggcgcgccatgcttcatcagactct

SEQ ID NO: 4681 - DNA, 156 bp, Artificial Sequence; identical to SEQ ID NO: 4680
  Synthetic polynucleotide

SEQ ID NO: 4682 - DNA, 191 bp, Artificial Sequence
  Synthetic polynucleotide
atcatctcaccttgcctcctgctcagtagtgggcgcatcctgcaggaaacaatgtcattgtttagaaaacaatgtcattgttttcgaaacaatgtcattgtttgacaaacaatgtcattgtttctaaaacaatgtcattgtttactaaacaatgtcattgttttgcggcgcgccatgcttcatcagactct

SEQ ID NO: 4683 - DNA, 191 bp, Artificial Sequence; identical to SEQ ID NO: 4682
  Synthetic polynucleotide

SEQ ID NO: 4684 - DNA, 185 bp, Artificial Sequence
  Synthetic polynucleotide
atcatctcaccttgcctcctgatgggattatacgcttacctgcagggcccccaggcggagggagagcccccaggcggagggtcggcccccaggcggaggggacgcccccaggcggagggctagcccccaggcggagggactgcccccaggcggagggtgcggcgcgccatgcttcatcagactct

SEQ ID NO: 4685 - DNA, 185 bp, Artificial Sequence; identical to SEQ ID NO: 4684
  Synthetic polynucleotide

SEQ ID NO: 4686 - DNA, 164 bp, Artificial Sequence
  Synthetic polynucleotide
atcatctcaccttgcctcctgcgtcatcatagacagaacctgcaggcctgctggtagacctgctggttcgcctgctggtgaccctgctggtctacctgctggtactcctgctggttgccctgctggtgtacctgctggtggcgcgccatgcttcatcagactct

SEQ ID NO: 4687 - DNA, 164 bp, Artificial Sequence; identical to SEQ ID NO: 4686
  Synthetic polynucleotide

SEQ ID NO: 4688 - DNA, 180 bp, Artificial Sequence
  Synthetic polynucleotide
atcatctcaccttgcctcctggcgaataagttgatggtcctgcaggtgtttgtttttagatgtttgttttttcgtgtttgtttttgactgtttgtttttctatgtttgtttttacttgtttgttttttgctgtttgtttttgtatgtttgtttttggcgcgccatgcttcatcagactct

SEQ ID NO: 4689 - DNA, 180 bp, Artificial Sequence; identical to SEQ ID NO: 4688
  Synthetic polynucleotide

SEQ ID NO: 4690 - DNA, 200 bp, Artificial Sequence
  Synthetic polynucleotide
atcatctcaccttgcctcctggctacgtttgtttagcgcctgcaggtcacacctaaaaggtgtgaagatcacacctaaaaggtgtgatcgtcacacctaaaaggtgtgagactcacacctaaaaggtgtgactatcacacctaaaaggtgtgaacttcacacctaaaaggtgtgaggcgcgccatgcttcatcagactct

SEQ ID NO: 4691 - DNA, 200 bp, Artificial Sequence; identical to SEQ ID NO: 4690
  Synthetic polynucleotide

SEQ ID NO: 4692 - DNA, 172 bp, Artificial Sequence
  Synthetic polynucleotide
atcatctcaccttgcctcctgaccgctagtaagtgactcctgcaggaacacctgctagaaacacctgcttcgaacacctgctgacaacacctgctctaaacacctgctactaacacctgcttgcaacacctgctgtaaacacctgctggcgcgccatgcttcatcagactct

SEQ ID NO: 4693 - DNA, 172 bp, Artificial Sequence; identical to SEQ ID NO: 4692
  Synthetic polynucleotide

SEQ ID NO: 4694 - DNA, 196 bp, Artificial Sequence
  Synthetic polynucleotide
atcatctcaccttgcctcctgtgaagggttgataccatcctgcaggccgcccccaggccagaccgcccccaggcctcgccgcccccaggccgacccgcccccaggccctaccgcccccaggccactccgcccccaggcctgcccgcccccaggccgtaccgcccccaggccggcgcgccatgcttcatcagactct

SEQ ID NO: 4695 - DNA, 196 bp, Artificial Sequence; identical to SEQ ID NO: 4694
  Synthetic polynucleotide

SEQ ID NO: 4696 - DNA, 197 bp, Artificial Sequence
  Synthetic polynucleotide
atcatctcaccttgcctcctgtggttagtgggtgcagccctgcaggatagtctgataagggggtagaatagtctgataagggggttcgatagtctgataagggggtgacatagtctgataagggggtctaatagtctgataagggggtactatagtctgataagggggttgcggcgcgccatgcttcatcagactct

SEQ ID NO: 4697 - DNA, 197 bp, Artificial Sequence; identical to SEQ ID NO: 4696
  Synthetic polynucleotide

SEQ ID NO: 4698 - DNA, 156 bp, Artificial Sequence
  Synthetic polynucleotide
atcatctcaccttgcctcctgactcttgtcccgtgctgcctgcaggggattaacagaggattaactcgggattaacgacggattaacctaggattaacactggattaactgcggattaacgtaggattaacggcgcgccatgcttcatcagactct

SEQ ID NO: 4699 - DNA, 156 bp, Artificial Sequence; identical to SEQ ID NO: 4698
  Synthetic polynucleotide

SEQ ID NO: 4700 - DNA, 140 bp, Artificial Sequence
  Synthetic polynucleotide
atcatctcaccttgcctcctgataacaccaatcgtagccctgcaggcttccgagacttccgtcgcttccggaccttccgctacttccgactcttccgtgccttccggtacttccgggcgcgccatgcttcatcagactct

SEQ ID NO: 4701 - DNA, 140 bp, Artificial Sequence; identical to SEQ ID NO: 4700
  Synthetic polynucleotide

SEQ ID NO: 4702 - DNA, 196 bp, Artificial Sequence
  Synthetic polynucleotide
atcatctcaccttgcctcctggttccggcagatcctagcctgcaggtaattggcaattaagataattggcaattatcgtaattggcaattagactaattggcaattactataattggcaattaacttaattggcaattatgctaattggcaattagtataattggcaattaggcgcgccatgcttcatcagactct

SEQ ID NO: 4703 - DNA, 196 bp, Artificial Sequence; identical to SEQ ID NO: 4702
  Synthetic polynucleotide

SEQ ID NO: 4704 - DNA, 188 bp, Artificial Sequence
  Synthetic polynucleotide
atcatctcaccttgcctcctgaaactaaatcgcggtcacctgcagggagaacaaagcgagagagaacaaagcgtcggagaacaaagcggacgagaacaaagcgctagagaacaaagcgactgagaacaaagcgtgcgagaacaaagcggtagagaacaaagcgggcgcgccatgcttcatcagactct

SEQ ID NO: 4705 - DNA, 188 bp, Artificial Sequence; identical to SEQ ID NO: 4704
  Synthetic polynucleotide

SEQ ID NO: 4706 - DNA, 164 bp, Artificial Sequence
  Synthetic polynucleotide
atcatctcaccttgcctcctgtatcgcttcagcgtccgcctgcaggtgggcgtggagatgggcgtggtcgtgggcgtgggactgggcgtggctatgggcgtggacttgggcgtggtgctgggcgtgggtatgggcgtggggcgcgccatgcttcatcagactct

SEQ ID NO: 4707 - DNA, 164 bp, Artificial Sequence; identical to SEQ ID NO: 4706
  Synthetic polynucleotide

SEQ ID NO: 4708 - DNA, 188 bp, Artificial Sequence
  Synthetic polynucleotide
atcatctcaccttgcctcctgagtataggtccctccagcctgcaggccatatatgggcagaccatatatgggctcgccatatatgggcgacccatatatgggcctaccatatatgggcactccatatatgggctgcccatatatgggcgtaccatatatgggcggcgcgccatgcttcatcagactct

SEQ ID NO: 4709 - DNA, 188 bp, Artificial Sequence; identical to SEQ ID NO: 4708
  Synthetic polynucleotide

SEQ ID NO: 4710 - DNA, 185 bp, Artificial Sequence
  Synthetic polynucleotide
atcatctcaccttgcctcctgcggtaatgagcccttagcctgcaggtaagccacttgaaattagataagccacttgaaatttcgtaagccacttgaaattgactaagccacttgaaattctataagccacttgaaattacttaagccacttgaaatttgcggcgcgccatgcttcatcagactct

SEQ ID NO: 4711 - DNA, 185 bp, Artificial Sequence; identical to SEQ ID NO: 4710
  Synthetic polynucleotide

SEQ ID NO: 4712 - DNA, 156 bp, Artificial Sequence
  Synthetic polynucleotide
atcatctcaccttgcctcctgtttccggaataagacatcctgcaggcccaaaatagacccaaaattcgcccaaaatgaccccaaaatctacccaaaatactcccaaaattgccccaaaatgtacccaaaatggcgcgccatgcttcatcagactct

SEQ ID NO: 4713 - DNA, 156 bp, Artificial Sequence; identical to SEQ ID NO: 4712
  Synthetic polynucleotide

SEQ ID NO: 4714 - DNA, 197 bp, Artificial Sequence
  Synthetic polynucleotide
atcatctcaccttgcctcctgtctttaccatcatgcagcctgcagggtgaccttatgaggtcacagagtgaccttatgaggtcactcggtgaccttatgaggtcacgacgtgaccttatgaggtcacctagtgaccttatgaggtcacactgtgaccttatgaggtcactgcggcgcgccatgcttcatcagactct

SEQ ID NO: 4715 - DNA, 197 bp, Artificial Sequence; identical to SEQ ID NO: 4714
  Synthetic polynucleotide

SEQ ID NO: 4716 - DNA, 180 bp, Artificial Sequence
  Synthetic polynucleotide
atcatctcaccttgcctcctgtgtctcgtgatctactgcctgcaggagtaattacttagaagtaattactttcgagtaattacttgacagtaattacttctaagtaattacttactagtaattactttgcagtaattacttgtaagtaattacttggcgcgccatgcttcatcagactct

SEQ ID NO: 4717 - DNA, 180 bp, Artificial Sequence; identical to SEQ ID NO: 4716
  Synthetic polynucleotide

SEQ ID NO: 4718 - DNA, 156 bp, Artificial Sequence
  Synthetic polynucleotide
atcatctcaccttgcctcctgtggtatggcatcgtactcctgcaggtttaattgagatttaattgtcgtttaattggactttaattgctatttaattgacttttaattgtgctttaattggtatttaattgggcgcgccatgcttcatcagactct

SEQ ID NO: 4719 - DNA, 156 bp, Artificial Sequence; identical to SEQ ID NO: 4718
  Synthetic polynucleotide

SEQ ID NO: 4720 - DNA, 186 bp, Artificial Sequence
  Synthetic polynucleotide
atcatctcaccttgcctcctgtcgccatccactggtctcctgcaggcaagtgtcacgtgttacttgagacaagtgtcacgtgttacttgtcgcaagtgtcacgtgttacttggaccaagtgtcacgtgttacttgctacaagtgtcacgtgttacttgactggcgcgccatgcttcatcagactct

SEQ ID NO: 4721 - DNA, 186 bp, Artificial Sequence; identical to SEQ ID NO: 4720
  Synthetic polynucleotide

SEQ ID NO: 4722 - DNA, 180 bp, Artificial Sequence
  Synthetic polynucleotide
atcatctcaccttgcctcctgggtcaggaacattatggcctgcagggcgcctgcgcaagagcgcctgcgcatcggcgcctgcgcagacgcgcctgcgcactagcgcctgcgcaactgcgcctgcgcatgcgcgcctgcgcagtagcgcctgcgcaggcgcgccatgcttcatcagactct

SEQ ID NO: 4723 - DNA, 180 bp, Artificial Sequence; identical to SEQ ID NO: 4722
  Synthetic polynucleotide

SEQ ID NO: 4724 - DNA, 196 bp, Artificial Sequence
  Synthetic polynucleotide
atcatctcaccttgcctcctggtcagcttaaccacaggcctgcagggaatgagtcagcaagagaatgagtcagcatcggaatgagtcagcagacgaatgagtcagcactagaatgagtcagcaactgaatgagtcagcatgcgaatgagtcagcagtagaatgagtcagcaggcgcgccatgcttcatcagactct

SEQ ID NO: 4725 - DNA, 196 bp, Artificial Sequence; identical to SEQ ID NO: 4724
  Synthetic polynucleotide

SEQ ID NO: 4726 - DNA, 172 bp, Artificial Sequence
  Synthetic polynucleotide
atcatctcaccttgcctcctgggagtcgcttccttatccctgcaggtcgcctcaggagatcgcctcaggtcgtcgcctcagggactcgcctcaggctatcgcctcaggacttcgcctcaggtgctcgcctcagggtatcgcctcaggggcgcgccatgcttcatcagactct

SEQ ID NO: 4727 - DNA, 172 bp, Artificial Sequence; identical to SEQ ID NO: 4726
  Synthetic polynucleotide

SEQ ID NO: 4728 - DNA, 172 bp, Artificial Sequence
  Synthetic polynucleotide
atcatctcaccttgcctcctgtcagagcgttaattccgcctgcagggctaattgctagagctaattgcttcggctaattgctgacgctaattgctctagctaattgctactgctaattgcttgcgctaattgctgtagctaattgctggcgcgccatgcttcatcagactct

SEQ ID NO: 4729 - DNA, 172 bp, Artificial Sequence; identical to SEQ ID NO: 4728
  Synthetic polynucleotide

SEQ ID NO: 4730 - DNA, 156 bp, Artificial Sequence
  Synthetic polynucleotide
atcatctcaccttgcctcctggagcgcacacctactagcctgcaggtttaattaagatttaattatcgtttaattagactttaattactatttaattaacttttaattatgctttaattagtatttaattaggcgcgccatgcttcatcagactct

SEQ ID NO: 4731 - DNA, 156 bp, Artificial Sequence; identical to SEQ ID NO: 4730
  Synthetic polynucleotide

SEQ ID NO: 4732 - DNA, 180 bp, Artificial Sequence
  Synthetic polynucleotide
atcatctcaccttgcctcctgcgagcgcacggatttctcctgcaggtgacccacataagatgacccacatatcgtgacccacatagactgacccacatactatgacccacataacttgacccacatatgctgacccacatagtatgacccacataggcgcgccatgcttcatcagactct

SEQ ID NO: 4733 - DNA, 180 bp, Artificial Sequence; identical to SEQ ID NO: 4732
  Synthetic polynucleotide

SEQ ID NO: 4734 - DNA, 172 bp, Artificial Sequence
  Synthetic polynucleotide
atcatctcaccttgcctcctgattgataacgggcatttcctgcagggttaattactagagttaattacttcggttaattactgacgttaattactctagttaattactactgttaattacttgcgttaattactgtagttaattactggcgcgccatgcttcatcagactct

SEQ ID NO: 4735 - DNA, 172 bp, Artificial Sequence; identical to SEQ ID NO: 4734
  Synthetic polynucleotide

SEQ ID NO: 4736 - DNA, 156 bp, Artificial Sequence
  Synthetic polynucleotide
atcatctcaccttgcctcctgaaggacgccagttgggacctgcaggtcacgtgaagatcacgtgatcgtcacgtgagactcacgtgactatcacgtgaacttcacgtgatgctcacgtgagtatcacgtgaggcgcgccatgcttcatcagactct

SEQ ID NO: 4737 - DNA, 156 bp, Artificial Sequence; identical to SEQ ID NO: 4736
  Synthetic polynucleotide

SEQ ID NO: 4738 - DNA, 172 bp, Artificial Sequence
  Synthetic polynucleotide
atcatctcaccttgcctcctgtatccaccgcagcagaccctgcagggccacgtgcgagagccacgtgcgtcggccacgtgcggacgccacgtgcgctagccacgtgcgactgccacgtgcgtgcgccacgtgcggtagccacgtgcgggcgcgccatgcttcatcagactct

SEQ ID NO: 4739 - DNA, 172 bp, Artificial Sequence; identical to SEQ ID NO: 4738
  Synthetic polynucleotide

SEQ ID NO: 4740 - DNA, 156 bp, Artificial Sequence
  Synthetic polynucleotide
atcatctcaccttgcctcctgggtcaataagagcatgtcctgcaggtcacgtgcagatcacgtgctcgtcacgtgcgactcacgtgcctatcacgtgcacttcacgtgctgctcacgtgcgtatcacgtgcggcgcgccatgcttcatcagactct

SEQ ID NO: 4741 - DNA, 156 bp, Artificial Sequence; identical to SEQ ID NO: 4740
  Synthetic polynucleotide

SEQ ID NO: 4742 - DNA, 188 bp, Artificial Sequence
  Synthetic polynucleotide
atcatctcaccttgcctcctgagatttgtactgcgtaacctgcaggcgccccctggtgagacgccccctggtgtcgcgccccctggtggaccgccccctggtgctacgccccctggtgactcgccccctggtgtgccgccccctggtggtacgccccctggtgggcgcgccatgcttcatcagactct

SEQ ID NO: 4743 - DNA, 188 bp, Artificial Sequence; identical to SEQ ID NO: 4742
  Synthetic polynucleotide

SEQ ID NO: 4744 - DNA, 197 bp, Artificial Sequence
  Synthetic polynucleotide
atcatctcaccttgcctcctgaacgctcgcaatttgatcctgcaggtccgctccgggttttagatccgctccgggtttttcgtccgctccgggttttgactccgctccgggttttctatccgctccgggttttacttccgctccgggtttttgctccgctccgggttttgtaggcgcgccatgcttcatcagactct

SEQ ID NO: 4745 - DNA, 197 bp, Artificial Sequence; identical to SEQ ID NO: 4744
  Synthetic polynucleotide

SEQ ID NO: 4746 - DNA, 172 bp, Artificial Sequence
  Synthetic polynucleotide
atcatctcaccttgcctcctgtgactcggaaggagaagcctgcaggagaggaagtgagaagaggaagtgtcgagaggaagtggacagaggaagtgctaagaggaagtgactagaggaagtgtgcagaggaagtggtaagaggaagtgggcgcgccatgcttcatcagactct

SEQ ID NO: 4747 - DNA, 172 bp, Artificial Sequence; identical to SEQ ID NO: 4746
  Synthetic polynucleotide

SEQ ID NO: 4748 - DNA, 185 bp, Artificial Sequence
  Synthetic polynucleotide
atcatctcaccttgcctcctggaagaggcgaaacacctcctgcaggggaacaggatgttcttagaggaacaggatgttctttcgggaacaggatgttcttgacggaacaggatgttcttctaggaacaggatgttcttactggaacaggatgttctttgcggcgcgccatgcttcatcagactct

SEQ ID NO: 4749 - DNA, 185 bp, Artificial Sequence; identical to SEQ ID NO: 4748
  Synthetic polynucleotide

SEQ ID NO: 4750 - DNA, 197 bp, Artificial Sequence
  Synthetic polynucleotide
atcatctcaccttgcctcctgagtaattaaacactcggcctgcagggaccgtttaacggttagagaccgtttaacggtttcggaccgtttaacggttgacgaccgtttaacggttctagaccgtttaacggttactgaccgtttaacggtttgcgaccgtttaacggttgtaggcgcgccatgcttcatcagactct

SEQ ID NO: 4751 - DNA, 197 bp, Artificial Sequence; identical to SEQ ID NO: 4750
  Synthetic polynucleotide

SEQ ID NO: 4752 - DNA, 172 bp, Artificial Sequence
  Synthetic polynucleotide
atcatctcaccttgcctcctggggtccaaccctgaaagcctgcagggttaattaacagagttaattaactcggttaattaacgacgttaattaacctagttaattaacactgttaattaactgcgttaattaacgtagttaattaacggcgcgccatgcttcatcagactct

SEQ ID NO: 4753 - DNA, 172 bp, Artificial Sequence; identical to SEQ ID NO: 4752
  Synthetic polynucleotide

SEQ ID NO: 4754 - DNA, 191 bp, Artificial Sequence
  Synthetic polynucleotide
atcatctcaccttgcctcctggaaatgaaccatacgcacctgcagggaccatataaggcaactagagaccatataaggcaacttcggaccatataaggcaactgacgaccatataaggcaactctagaccatataaggcaactactgaccatataaggcaacttgcggcgcgccatgcttcatcagactct

SEQ ID NO: 4755 - DNA, 191 bp, Artificial Sequence; identical to SEQ ID NO: 4754
  Synthetic polynucleotide

SEQ ID NO: 4756 - DNA, 164 bp, Artificial Sequence
  Synthetic polynucleotide
atcatctcaccttgcctcctgtacacgcatttgctctacctgcaggacacctgttagaacacctgtttcgacacctgttgacacacctgttctaacacctgttactacacctgtttgcacacctgttgtaacacctgttggcgcgccatgcttcatcagactct

SEQ ID NO: 4757 - DNA, 164 bp, Artificial Sequence; identical to SEQ ID NO: 4756
  Synthetic polynucleotide

SEQ ID NO: 4758 - DNA, 172 bp, Artificial Sequence
  Synthetic polynucleotide
atcatctcaccttgcctcctgttgcgatgccatttcgtcctgcaggagcgtgaccgagaagcgtgaccgtcgagcgtgaccggacagcgtgaccgctaagcgtgaccgactagcgtgaccgtgcagcgtgaccggtaagcgtgaccgggcgcgccatgcttcatcagactct

SEQ ID NO: 4759 - DNA, 172 bp, Artificial Sequence; identical to SEQ ID NO: 4758
  Synthetic polynucleotide

SEQ ID NO: 4760 - DNA, 172 bp, Artificial Sequence
  Synthetic polynucleotide
atcatctcaccttgcctcctgatgacaacggcattatccctgcaggtacttccggtagatacttccggttcgtacttccggtgactacttccggtctatacttccggtacttacttccggttgctacttccggtgtatacttccggtggcgcgccatgcttcatcagactct

SEQ ID NO: 4761 - DNA, 172 bp, Artificial Sequence; identical to SEQ ID NO: 4760
  Synthetic polynucleotide

SEQ ID NO: 4762 - DNA, 180 bp, Artificial Sequence
  Synthetic polynucleotide
atcatctcaccttgcctcctggtgttgagctgtaggttcctgcaggatgtttattttagaatgtttatttttcgatgtttattttgacatgtttattttctaatgtttattttactatgtttatttttgcatgtttattttgtaatgtttattttggcgcgccatgcttcatcagactct

SEQ ID NO: 4763 - DNA, 180 bp, Artificial Sequence; identical to SEQ ID NO: 4762
  Synthetic polynucleotide

SEQ ID NO: 4764 - DNA, 172 bp, Artificial Sequence
  Synthetic polynucleotide
atcatctcaccttgcctcctgcgtatcgccagtctgagcctgcaggattacgtaacagaattacgtaactcgattacgtaacgacattacgtaacctaattacgtaacactattacgtaactgcattacgtaacgtaattacgtaacggcgcgccatgcttcatcagactct

SEQ ID NO: 4765 - DNA, 172 bp, Artificial Sequence; identical to SEQ ID NO: 4764
  Synthetic polynucleotide

SEQ ID NO: 4766 - DNA, 140 bp, Artificial Sequence
  Synthetic polynucleotide
atcatctcaccttgcctcctgacctcaggaactgatgccctgcaggctttgtagactttgttcgctttgtgacctttgtctactttgtactctttgttgcctttgtgtactttgtggcgcgccatgcttcatcagactct

SEQ ID NO: 4767 - DNA, 140 bp, Artificial Sequence; identical to SEQ ID NO: 4766
  Synthetic polynucleotide

SEQ ID NO: 4768 - DNA, 156 bp, Artificial Sequence
  Synthetic polynucleotide
atcatctcaccttgcctcctgctgttgggctttcgaggcctgcaggtataaataagatataaatatcgtataaatagactataaatactatataaataacttataaatatgctataaatagtatataaataggcgcgccatgcttcatcagactct

SEQ ID NO: 4769 - DNA, 156 bp, Artificial Sequence; identical to SEQ ID NO: 4768
  Synthetic polynucleotide

SEQ ID NO: 4770 - DNA, 180 bp, Artificial Sequence
  Synthetic polynucleotide
atcatctcaccttgcctcctgatctgttcggttatagccctgcaggtgcctcaggctagatgcctcaggcttcgtgcctcaggctgactgcctcaggctctatgcctcaggctacttgcctcaggcttgctgcctcaggctgtatgcctcaggctggcgcgccatgcttcatcagactct

SEQ ID NO: 4771 - DNA, 180 bp, Artificial Sequence; identical to SEQ ID NO: 4770
  Synthetic polynucleotide

SEQ ID NO: 4772 - DNA, 200 bp, Artificial Sequence
  Synthetic polynucleotide
atcatctcaccttgcctcctggcttgttgcgcttctcccctgcaggttgccttatttggccatggagattgccttatttggccatggtcgttgccttatttggccatgggacttgccttatttggccatggctattgccttatttggccatggactttgccttatttggccatggggcgcgccatgcttcatcagactct

SEQ ID NO: 4773 - DNA, 200 bp, Artificial Sequence; identical to SEQ ID NO: 4772
  Synthetic polynucleotide

SEQ ID NO: 4774 - DNA, 197 bp, Artificial Sequence
  Synthetic polynucleotide
atcatctcaccttgcctcctgaccgccctactacatgccctgcaggttttcagtgtgtgcaagattttcagtgtgtgcatcgttttcagtgtgtgcagacttttcagtgtgtgcactattttcagtgtgtgcaactttttcagtgtgtgcatgcttttcagtgtgtgcagtaggcgcgccatgcttcatcagactct

SEQ ID NO: 4775 - DNA, 197 bp, Artificial Sequence; identical to SEQ ID NO: 4774
  Synthetic polynucleotide

SEQ ID NO: 4776 - DNA, 164 bp, Artificial Sequence
  Synthetic polynucleotide
atcatctcaccttgcctcctgatcaaattaacgccacacctgcaggaaccggttaagaaaccggttatcgaaccggttagacaaccggttactaaaccggttaactaaccggttatgcaaccggttagtaaaccggttaggcgcgccatgcttcatcagactct

SEQ ID NO: 4777 - DNA, 164 bp, Artificial Sequence; identical to SEQ ID NO: 4776
  Synthetic polynucleotide

SEQ ID NO: 4778 - DNA, 180 bp, Artificial Sequence
  Synthetic polynucleotide
atcatctcaccttgcctcctgattggtttaagcaaccgcctgcaggagccaatcagcagaagccaatcagctcgagccaatcagcgacagccaatcagcctaagccaatcagcactagccaatcagctgcagccaatcagcgtaagccaatcagcggcgcgccatgcttcatcagactct

SEQ ID NO: 4779 - DNA, 180 bp, Artificial Sequence; identical to SEQ ID NO: 4778
  Synthetic polynucleotide

SEQ ID NO: 4780 - DNA, 140 bp, Artificial Sequence
  Synthetic polynucleotide
atcatctcaccttgcctcctgcatagcagatccagcttcctgcaggctttgaagactttgatcgctttgagacctttgactactttgaactctttgatgcctttgagtactttgaggcgcgccatgcttcatcagactct

SEQ ID NO: 4781 - DNA, 140 bp, Artificial Sequence; identical to SEQ ID NO: 4780
  Synthetic polynucleotide

SEQ ID NO: 4782 - DNA, 188 bp, Artificial Sequence
  Synthetic polynucleotide
atcatctcaccttgcctcctgtacgggtcgcgctgattcctgcaggtgccacgtggcaagatgccacgtggcatcgtgccacgtggcagactgccacgtggcactatgccacgtggcaacttgccacgtggcatgctgccacgtggcagtatgccacgtggcaggcgcgccatgcttcatcagactct

SEQ ID NO: 4783 - DNA, 188 bp, Artificial Sequence; identical to SEQ ID NO: 4782
  Synthetic polynucleotide

SEQ ID NO: 4784 - DNA, 164 bp, Artificial Sequence
  Synthetic polynucleotide
atcatctcaccttgcctcctgggctaagtggttatgtccctgcaggacacctgtcagaacacctgtctcgacacctgtcgacacacctgtcctaacacctgtcactacacctgtctgcacacctgtcgtaacacctgtcggcgcgccatgcttcatcagactct

SEQ ID NO: 4785 - DNA, 164 bp, Artificial Sequence; identical to SEQ ID NO: 4784
  Synthetic polynucleotide

SEQ ID NO: 4786 - DNA, 156 bp, Artificial Sequence
  Synthetic polynucleotide
atcatctcaccttgcctcctggctggaacttagttcgacctgcaggcttccggtagacttccggttcgcttccggtgaccttccggtctacttccggtactcttccggttgccttccggtgtacttccggtggcgcgccatgcttcatcagactct

SEQ ID NO: 4787 - DNA, 156 bp, Artificial Sequence; identical to SEQ ID NO: 4786
  Synthetic polynucleotide

SEQ ID NO: 4788 - DNA, 190 bp, Artificial Sequence
  Synthetic polynucleotide
atcatctcaccttgcctcctgtattcgaaccgcattctcctgcaggcacatgcgggtattagacacatgcgggtatttcgcacatgcgggtattgaccacatgcgggtattctacacatgcgggtattactcacatgcgggtatttgccacatgcgggtattgtaggcgcgccatgcttcatcagactct

SEQ ID NO: 4789 - DNA, 190 bp, Artificial Sequence; identical to SEQ ID NO: 4788
  Synthetic polynucleotide

SEQ ID NO: 4790 - DNA, 156 bp, Artificial Sequence
  Synthetic polynucleotide
atcatctcaccttgcctcctgtgattgtcacagtgagacctgcagggatacattagagatacatttcggatacattgacgatacattctagatacattactgatacatttgcgatacattgtagatacattggcgcgccatgcttcatcagactct

SEQ ID NO: 4791 - DNA, 156 bp, Artificial Sequence; identical to SEQ ID NO: 4790
  Synthetic polynucleotide

SEQ ID NO: 4792 - DNA, 172 bp, Artificial Sequence
  Synthetic polynucleotide
atcatctcaccttgcctcctgccgcatgtgacgttgaacctgcaggaacacgtgttagaaacacgtgtttcgaacacgtgttgacaacacgtgttctaaacacgtgttactaacacgtgtttgcaacacgtgttgtaaacacgtgttggcgcgccatgcttcatcagactct

SEQ ID NO: 4793 - DNA, 172 bp, Artificial Sequence; identical to SEQ ID NO: 4792
  Synthetic polynucleotide

SEQ ID NO: 4794 - DNA, 190 bp, Artificial Sequence
  Synthetic polynucleotide
atcatctcaccttgcctcctgtgtcgcggataaggagccctgcaggttattagtacataaagattattagtacataatcgttattagtacataagacttattagtacataactattattagtacataaactttattagtacataatgcttattagtacataagtaggcgcgccatgcttcatcagactct

SEQ ID NO: 4795 - DNA, 190 bp, Artificial Sequence; identical to SEQ ID NO: 4794
  Synthetic polynucleotide

SEQ ID NO: 4796 - DNA, 180 bp, Artificial Sequence
  Synthetic polynucleotide
atcatctcaccttgcctcctgacctgagtgggatcaagcctgcaggtaatttatgcaagataatttatgcatcgtaatttatgcagactaatttatgcactataatttatgcaacttaatttatgcatgctaatttatgcagtataatttatgcaggcgcgccatgcttcatcagactct

SEQ ID NO: 4797 - DNA, 180 bp, Artificial Sequence; identical to SEQ ID NO: 4796
  Synthetic polynucleotide

SEQ ID NO: 4798 - DNA, 183 bp, Artificial Sequence
  Synthetic polynucleotide
atcatctcaccttgcctcctggaaggcttccgctgacacctgcaggcggggcattctgggaattgtagtccagacggggcattctgggaattgtagtcctcgcggggcattctgggaattgtagtccgaccggggcattctgggaattgtagtccctaggcgcgccatgcttcatcagactct

SEQ ID NO: 4799 - DNA, 183 bp, Artificial Sequence; identical to SEQ ID NO: 4798
  Synthetic polynucleotide

SEQ ID NO: 4800 - DNA, 172 bp, Artificial Sequence
  Synthetic polynucleotide
atcatctcaccttgcctcctgtcggtagtcacatggagcctgcaggcgaggtcagtagacgaggtcagttcgcgaggtcagtgaccgaggtcagtctacgaggtcagtactcgaggtcagttgccgaggtcagtgtacgaggtcagtggcgcgccatgcttcatcagactct

SEQ ID NO: 4801 - DNA, 172 bp, Artificial Sequence; identical to SEQ ID NO: 4800
  Synthetic polynucleotide

SEQ ID NO: 4802 - DNA, 172 bp, Artificial Sequence
  Synthetic polynucleotide
atcatctcaccttgcctcctgcctctatacaccactaccctgcagggccaccaggtagagccaccaggttcggccaccaggtgacgccaccaggtctagccaccaggtactgccaccaggttgcgccaccaggtgtagccaccaggtggcgcgccatgcttcatcagactct

SEQ ID NO: 4803 - DNA, 172 bp, Artificial Sequence; identical to SEQ ID NO: 4802
  Synthetic polynucleotide

SEQ ID NO: 4804 - DNA, 196 bp, Artificial Sequence
  Synthetic polynucleotide
atcatctcaccttgcctcctgcatcctcatagtgttagcctgcaggtgcccacgtggtgagatgcccacgtggtgtcgtgcccacgtggtggactgcccacgtggtgctatgcccacgtggtgacttgcccacgtggtgtgctgcccacgtggtggtatgcccacgtggtgggcgcgccatgcttcatcagactct

SEQ ID NO: 4805 - DNA, 196 bp, Artificial Sequence; identical to SEQ ID NO: 4804
  Synthetic polynucleotide

SEQ ID NO: 4806 - DNA, 188 bp, Artificial Sequence
  Synthetic polynucleotide
atcatctcaccttgcctcctgggtagagatagttagtgcctgcaggtttggcgggaaaagatttggcgggaaatcgtttggcgggaaagactttggcgggaaactatttggcgggaaaacttttggcgggaaatgctttggcgggaaagtatttggcgggaaaggcgcgccatgcttcatcagactct

SEQ ID NO: 4807 - DNA, 188 bp, Artificial Sequence; identical to SEQ ID NO: 4806
  Synthetic polynucleotide

SEQ ID NO: 4808 - DNA, 172 bp, Artificial Sequence
  Synthetic polynucleotide
atcatctcaccttgcctcctgtgtgatgaaatcacggacctgcaggcacctgctccagacacctgctcctcgcacctgctccgaccacctgctccctacacctgctccactcacctgctcctgccacctgctccgtacacctgctccggcgcgccatgcttcatcagactct

SEQ ID NO: 4809 - DNA, 172 bp, Artificial Sequence; identical to SEQ ID NO: 4808
  Synthetic polynucleotide

SEQ ID NO: 4810 - DNA, 148 bp, Artificial Sequence
  Synthetic polynucleotide
atcatctcaccttgcctcctgtccgcgtacgcattaggcctgcaggagaacagagaagaacagtcgagaacaggacagaacagctaagaacagactagaacagtgcagaacaggtaagaacagggcgcgccatgcttcatcagactct

SEQ ID NO: 4811 - DNA, 148 bp, Artificial Sequence; identical to SEQ ID NO: 4810
  Synthetic polynucleotide

SEQ ID NO: 4812 - DNA, 188 bp, Artificial Sequence
  Synthetic polynucleotide
atcatctcaccttgcctcctgatgtacctttgaggttccctgcaggaattgcgtcactagaaattgcgtcacttcgaattgcgtcactgacaattgcgtcactctaaattgcgtcactactaattgcgtcacttgcaattgcgtcactgtaaattgcgtcactggcgcgccatgcttcatcagactct

SEQ ID NO: 4813 - DNA, 188 bp, Artificial Sequence; identical to SEQ ID NO: 4812
  Synthetic polynucleotide

SEQ ID NO: 4814 - DNA, 191 bp, Artificial Sequence
  Synthetic polynucleotide
atcatctcaccttgcctcctgtaggatacggtcatcttcctgcaggaatagggtatcaattatagaaatagggtatcaattattcgaatagggtatcaattatgacaatagggtatcaattatctaaatagggtatcaattatactaatagggtatcaattattgcggcgcgccatgcttcatcagactct

SEQ ID NO: 4815 - DNA, 191 bp, Artificial Sequence; identical to SEQ ID NO: 4814
  Synthetic polynucleotide

SEQ ID NO: 4816 - DNA, 172 bp, Artificial Sequence
  Synthetic polynucleotide
atcatctcaccttgcctcctgcctctaagcctttaacgcctgcagggcccgggggcagagcccgggggctcggcccgggggcgacgcccgggggcctagcccgggggcactgcccgggggctgcgcccgggggcgtagcccgggggcggcgcgccatgcttcatcagactct

SEQ ID NO: 4817 - DNA, 172 bp, Artificial Sequence; identical to SEQ ID NO: 4816
  Synthetic polynucleotide

SEQ ID NO: 4818 - DNA, 172 bp, Artificial Sequence
  Synthetic polynucleotide
atcatctcaccttgcctcctggcaattccgtaatatctcctgcaggattacgtaatagaattacgtaattcgattacgtaatgacattacgtaatctaattacgtaatactattacgtaattgcattacgtaatgtaattacgtaatggcgcgccatgcttcatcagactct

SEQ ID NO: 4819 - DNA, 172 bp, Artificial Sequence; identical to SEQ ID NO: 4818
  Synthetic polynucleotide

SEQ ID NO: 4820 - DNA, 197 bp, Artificial Sequence
  Synthetic polynucleotide
atcatctcaccttgcctcctgggcgatttgcccatgcacctgcaggatttttggggggcttagaatttttggggggctttcgatttttggggggcttgacatttttggggggcttctaatttttggggggcttactatttttggggggctttgcatttttggggggcttgtaggcgcgccatgcttcatcagactct

SEQ ID NO: 4821 - DNA, 197 bp, Artificial Sequence; identical to SEQ ID NO: 4820
  Synthetic polynucleotide

SEQ ID NO: 4822 - DNA, 191 bp, Artificial Sequence
  Synthetic polynucleotide
atcatctcaccttgcctcctgttctttgagaagaatgccctgcaggggcgctctccgtggtgctgaaagaggcgctctccgtggtgctgaatcgggcgctctccgtggtgctgaagacggcgctctccgtggtgctgaactaggcgctctccgtggtgctgaaactggcgcgccatgcttcatcagactct

SEQ ID NO: 4823 - DNA, 191 bp, Artificial Sequence; identical to SEQ ID NO: 4822
  Synthetic polynucleotide

SEQ ID NO: 4824 - DNA, 188 bp, Artificial Sequence
  Synthetic polynucleotide
atcatctcaccttgcctcctgccctaatagagtcccggcctgcaggtgggaaatccccagatgggaaatcccctcgtgggaaatccccgactgggaaatccccctatgggaaatccccacttgggaaatcccctgctgggaaatccccgtatgggaaatccccggcgcgccatgcttcatcagactct

SEQ ID NO: 4825 - DNA, 188 bp, Artificial Sequence; identical to SEQ ID NO: 4824
  Synthetic polynucleotide

SEQ ID NO: 4826 - DNA, 172 bp, Artificial Sequence
  Synthetic polynucleotide
atcatctcaccttgcctcctgatactaagcctataagccctgcaggtactaattagagatactaattagtcgtactaattaggactactaattagctatactaattagacttactaattagtgctactaattaggtatactaattagggcgcgccatgcttcatcagactct

SEQ ID NO: 4827 - DNA, 172 bp, Artificial Sequence; identical to SEQ ID NO: 4826
  Synthetic polynucleotide

SEQ ID NO: 4828 - DNA, 191 bp, Artificial Sequence
  Synthetic polynucleotide
atcatctcaccttgcctcctgcaccatcacgctctgagcctgcaggtccaactaattagctcaagatccaactaattagctcatcgtccaactaattagctcagactccaactaattagctcactatccaactaattagctcaacttccaactaattagctcatgcggcgcgccatgcttcatcagactct

SEQ ID NO: 4829 - DNA, 191 bp, Artificial Sequence; identical to SEQ ID NO: 4828
  Synthetic polynucleotide

SEQ ID NO: 4830 - DNA, 191 bp, Artificial Sequence
  Synthetic polynucleotide
atcatctcaccttgcctcctgacgcgagaattacgtgacctgcaggaatcgttaatccctttaagaaatcgttaatccctttatcgaatcgttaatccctttagacaatcgttaatccctttactaaatcgttaatccctttaactaatcgttaatccctttatgcggcgcgccatgcttcatcagactct

SEQ ID NO: 4831 - DNA, 191 bp, Artificial Sequence; identical to SEQ ID NO: 4830
  Synthetic polynucleotide

SEQ ID NO: 4832 - DNA, 185 bp, Artificial Sequence
  Synthetic polynucleotide
atcatctcaccttgcctcctgcggttagggcctaaacgcctgcaggactatgccaacctaccagaactatgccaacctacctcgactatgccaacctaccgacactatgccaacctaccctaactatgccaacctaccactactatgccaacctacctgcggcgcgccatgcttcatcagactct

SEQ ID NO: 4833 - DNA, 185 bp, Artificial Sequence; identical to SEQ ID NO: 4832
  Synthetic polynucleotide

SEQ ID NO: 4834 - DNA, 164 bp, Artificial Sequence
  Synthetic polynucleotide
atcatctcaccttgcctcctgcaacccaggattgtctacctgcagggaccccccaagagaccccccatcggaccccccagacgaccccccactagaccccccaactgaccccccatgcgaccccccagtagaccccccaggcgcgccatgcttcatcagactct

SEQ ID NO: 4835 - DNA, 164 bp, Artificial Sequence; identical to SEQ ID NO: 4834
  Synthetic polynucleotide

SEQ ID NO: 4836 - DNA, 197 bp, Artificial Sequence
  Synthetic polynucleotide
atcatctcaccttgcctcctgtaggtcatactgggctccctgcaggcgcggccacgtgaccagacgcggccacgtgacctcgcgcggccacgtgaccgaccgcggccacgtgaccctacgcggccacgtgaccactcgcggccacgtgacctgccgcggccacgtgaccgtaggcgcgccatgcttcatcagactct

SEQ ID NO: 4837 - DNA, 197 bp, Artificial Sequence; identical to SEQ ID NO: 4836
  Synthetic polynucleotide

SEQ ID NO: 4838 - DNA, 188 bp, Artificial Sequence
  Synthetic polynucleotide
atcatctcaccttgcctcctgtcagcggctaaacgtagcctgcagggcacaggtgcagagagcacaggtgcagtcggcacaggtgcaggacgcacaggtgcagctagcacaggtgcagactgcacaggtgcagtgcgcacaggtgcaggtagcacaggtgcagggcgcgccatgcttcatcagactct

SEQ ID NO: 4839 - DNA, 188 bp, Artificial Sequence; identical to SEQ ID NO: 4838
  Synthetic polynucleotide

SEQ ID NO: 4840 - DNA, 172 bp, Artificial Sequence
  Synthetic polynucleotide
atcatctcaccttgcctcctgatattcaggaatttgcgcctgcagggctaattggtagagctaattggttcggctaattggtgacgctaattggtctagctaattggtactgctaattggttgcgctaattggtgtagctaattggtggcgcgccatgcttcatcagactct

SEQ ID NO: 4841 - DNA, 172 bp, Artificial Sequence; identical to SEQ ID NO: 4840
  Synthetic polynucleotide

SEQ ID NO: 4842 - DNA, 197 bp, Artificial Sequence
  Synthetic polynucleotide
atcatctcaccttgcctcctgctacaatagacgggaagcctgcaggggtcaacaggtggttagaggtcaacaggtggtttcgggtcaacaggtggttgacggtcaacaggtggttctaggtcaacaggtggttactggtcaacaggtggtttgcggtcaacaggtggttgtaggcgcgccatgcttcatcagactct

SEQ ID NO: 4843 - DNA, 197 bp, Artificial Sequence; identical to SEQ ID NO: 4842
  Synthetic polynucleotide

SEQ ID NO: 4844 - DNA, 188 bp, Artificial Sequence
  Synthetic polynucleotide
atcatctcaccttgcctcctgtaggacaccattaaccccctgcagggcgcatgcgcagagagcgcatgcgcagtcggcgcatgcgcaggacgcgcatgcgcagctagcgcatgcgcagactgcgcatgcgcagtgcgcgcatgcgcaggtagcgcatgcgcagggcgcgccatgcttcatcagactct

SEQ ID NO: 4845 - DNA, 188 bp, Artificial Sequence; identical to SEQ ID NO: 4844
  Synthetic polynucleotide

SEQ ID NO: 4846 - DNA, 197 bp, Artificial Sequence
  Synthetic polynucleotide
atcatctcaccttgcctcctgggacaatcgacgattaccctgcaggggcgcagctggtgccagaggcgcagctggtgcctcgggcgcagctggtgccgacggcgcagctggtgccctaggcgcagctggtgccactggcgcagctggtgcctgcggcgcagctggtgccgtaggcgcgccatgcttcatcagactct

SEQ ID NO: 4847 - DNA, 197 bp, Artificial Sequence; identical to SEQ ID NO: 4846
  Synthetic polynucleotide

SEQ ID NO: 4848 - DNA, 140 bp, Artificial Sequence
  Synthetic polynucleotide
atcatctcaccttgcctcctgtcagcgaaacacacaggcctgcaggataacaagaataacatcgataacagacataacactaataacaactataacatgcataacagtaataacaggcgcgccatgcttcatcagactct

SEQ ID NO: 4849 - DNA, 140 bp, Artificial Sequence; identical to SEQ ID NO: 4848
  Synthetic polynucleotide

SEQ ID NO: 4850 - DNA, 190 bp, Artificial Sequence
  Synthetic polynucleotide
atcatctcaccttgcctcctgaaccagtcgtagacttccctgcaggcaccagggggcagcagacaccagggggcagctcgcaccagggggcagcgaccaccagggggcagcctacaccagggggcagcactcaccagggggcagctgccaccagggggcagcgtaggcgcgccatgcttcatcagactct

SEQ ID NO: 4851 - DNA, 190 bp, Artificial Sequence; identical to SEQ ID NO: 4850
  Synthetic polynucleotide

SEQ ID NO: 4852 - DNA, 172 bp, Artificial Sequence
  Synthetic polynucleotide
atcatctcaccttgcctcctggcggagaacctctaagccctgcagggctaattggcagagctaattggctcggctaattggcgacgctaattggcctagctaattggcactgctaattggctgcgctaattggcgtagctaattggcggcgcgccatgcttcatcagactct

SEQ ID NO: 4853 - DNA, 172 bp, Artificial Sequence; identical to SEQ ID NO: 4852
  Synthetic polynucleotide

SEQ ID NO: 4854 - DNA, 172 bp, Artificial Sequence
  Synthetic polynucleotide
atcatctcaccttgcctcctgttccttgatggactgtacctgcagggctaattgggagagctaattgggtcggctaattggggacgctaattgggctagctaattgggactgctaattgggtgcgctaattggggtagctaattgggggcgcgccatgcttcatcagactct

SEQ ID NO: 4855 - DNA, 172 bp, Artificial Sequence; identical to SEQ ID NO: 4854
  Synthetic polynucleotide

SEQ ID NO: 4856 - DNA, 148 bp, Artificial Sequence
  Synthetic polynucleotide
atcatctcaccttgcctcctgcctagcggacttactggcctgcaggcaagcttagacaagctttcgcaagcttgaccaagcttctacaagcttactcaagctttgccaagcttgtacaagcttggcgcgccatgcttcatcagactct

SEQ ID NO: 4857 - DNA, 148 bp, Artificial Sequence; identical to SEQ ID NO: 4856
  Synthetic polynucleotide

SEQ ID NO: 4858 - DNA, 172 bp, Artificial Sequence
  Synthetic polynucleotide
atcatctcaccttgcctcctgtgtttatggcccactaccctgcaggaaatcccctcagaaaatcccctctcgaaatcccctcgacaaatcccctcctaaaatcccctcactaaatcccctctgcaaatcccctcgtaaaatcccctcggcgcgccatgcttcatcagactct

SEQ ID NO: 4859 - DNA, 172 bp, Artificial Sequence; identical to SEQ ID NO: 4858
  Synthetic polynucleotide

SEQ ID NO: 4860 - DNA, 164 bp, Artificial Sequence
  Synthetic polynucleotide
atcatctcaccttgcctcctgcgaggactctaggaatgcctgcagggggggccctagagggggcccttcggggggccctgacgggggccctctagggggccctactgggggcccttgcgggggccctgtagggggccctggcgcgccatgcttcatcagactct

SEQ ID NO: 4861 - DNA, 164 bp, Artificial Sequence; identical to SEQ ID NO: 4860
  Synthetic polynucleotide

SEQ ID NO: 4862 - DNA, 172 bp, Artificial Sequence
  Synthetic polynucleotide
atcatctcaccttgcctcctgctgttgtagagagaattcctgcaggacctgtcaatagaacctgtcaattcgacctgtcaatgacacctgtcaatctaacctgtcaatactacctgtcaattgcacctgtcaatgtaacctgtcaatggcgcgccatgcttcatcagactct

SEQ ID NO: 4863 - DNA, 172 bp, Artificial Sequence; identical to SEQ ID NO: 4862
  Synthetic polynucleotide

SEQ ID NO: 4864 - DNA, 172 bp, Artificial Sequence
  Synthetic polynucleotide
atcatctcaccttgcctcctgccttagtgattaccgatcctgcagggccacgtggcagagccacgtggctcggccacgtggcgacgccacgtggcctagccacgtggcactgccacgtggctgcgccacgtggcgtagccacgtggcggcgcgccatgcttcatcagactct

SEQ ID NO: 4865 - DNA, 172 bp, Artificial Sequence; identical to SEQ ID NO: 4864
  Synthetic polynucleotide

SEQ ID NO: 4866 - DNA, 164 bp, Artificial Sequence
  Synthetic polynucleotide
atcatctcaccttgcctcctgcttcagtacttcacagtcctgcaggtttcaagtgagatttcaagtgtcgtttcaagtggactttcaagtgctatttcaagtgacttttcaagtgtgctttcaagtggtatttcaagtgggcgcgccatgcttcatcagactct

SEQ ID NO: 4867 - DNA, 164 bp, Artificial Sequence; identical to SEQ ID NO: 4866
  Synthetic polynucleotide

SEQ ID NO: 4868 - DNA, 164 bp, Artificial Sequence
  Synthetic polynucleotide
atcatctcaccttgcctcctgcagctgaccgcttagctcctgcaggaaattcctgagaaaattcctgtcgaaattcctggacaaattcctgctaaaattcctgactaaattcctgtgcaaattcctggtaaaattcctgggcgcgccatgcttcatcagactct

SEQ ID NO: 4869 - DNA, 164 bp, Artificial Sequence; identical to SEQ ID NO: 4868
  Synthetic polynucleotide

SEQ ID NO: 4870 - DNA, 172 bp, Artificial Sequence
  Synthetic polynucleotide
atcatctcaccttgcctcctgattaacgtgcgcttcaccctgcaggtatgcaaattagatatgcaaatttcgtatgcaaattgactatgcaaattctatatgcaaattacttatgcaaatttgctatgcaaattgtatatgcaaattggcgcgccatgcttcatcagactct

SEQ ID NO: 4871 - DNA, 172 bp, Artificial Sequence; identical to SEQ ID NO: 4870
  Synthetic polynucleotide

SEQ ID NO: 4872 - DNA, 196 bp, Artificial Sequence
  Synthetic polynucleotide
atcatctcaccttgcctcctgattatggcaggtcagctcctgcaggctgacctacttttagactgacctactttttcgctgacctacttttgacctgacctacttttctactgacctacttttactctgacctactttttgcctgacctacttttgtactgacctacttttggcgcgccatgcttcatcagactct

SEQ ID NO: 4873 - DNA, 196 bp, Artificial Sequence; identical to SEQ ID NO: 4872
  Synthetic polynucleotide

SEQ ID NO: 4874 - DNA, 197 bp, Artificial Sequence
  Synthetic polynucleotide
atcatctcaccttgcctcctgcagtcgcggctttactccctgcaggaaaataatcgatataagaaaaataatcgatatatcgaaaataatcgatatagacaaaataatcgatatactaaaaataatcgatataactaaaataatcgatatatgcaaaataatcgatatagtaggcgcgccatgcttcatcagactct

SEQ ID NO: 4875 - DNA, 197 bp, Artificial Sequence; identical to SEQ ID NO: 4874
  Synthetic polynucleotide

SEQ ID NO: 4876 - DNA, 191 bp, Artificial Sequence
  Synthetic polynucleotide
atcatctcaccttgcctcctgctatgcgcaaatccgtccctgcaggtgacctctgttgaccttagatgacctctgttgacctttcgtgacctctgttgaccttgactgacctctgttgaccttctatgacctctgttgaccttacttgacctctgttgacctttgcggcgcgccatgcttcatcagactct

SEQ ID NO: 4877 - DNA, 191 bp, Artificial Sequence; identical to SEQ ID NO: 4876
  Synthetic polynucleotide

SEQ ID NO: 4878 - DNA, 180 bp, Artificial Sequence
  Synthetic polynucleotide
atcatctcaccttgcctcctgatagggcgaacggcgtacctgcagggtgacaggtggagagtgacaggtggtcggtgacaggtgggacgtgacaggtggctagtgacaggtggactgtgacaggtggtgcgtgacaggtgggtagtgacaggtggggcgcgccatgcttcatcagactct

SEQ ID NO: 4879 - DNA, 180 bp, Artificial Sequence; identical to SEQ ID NO: 4878
  Synthetic polynucleotide

SEQ ID NO: 4880 - DNA, 196 bp, Artificial Sequence
  Synthetic polynucleotide
atcatctcaccttgcctcctgactgattcgttgacaagcctgcaggagaacagtctgtaagaagaacagtctgtatcgagaacagtctgtagacagaacagtctgtactaagaacagtctgtaactagaacagtctgtatgcagaacagtctgtagtaagaacagtctgtaggcgcgccatgcttcatcagactct

SEQ ID NO: 4881 - DNA, 196 bp, Artificial Sequence; identical to SEQ ID NO: 4880
  Synthetic polynucleotide

SEQ ID NO: 4882 - DNA, 156 bp, Artificial Sequence
  Synthetic polynucleotide
atcatctcaccttgcctcctgatatctcctgggtttaacctgcaggtgaactctagatgaactcttcgtgaactctgactgaactctctatgaactctacttgaactcttgctgaactctgtatgaactctggcgcgccatgcttcatcagactct

SEQ ID NO: 4883 - DNA, 156 bp, Artificial Sequence; identical to SEQ ID NO: 4882
  Synthetic polynucleotide

SEQ ID NO: 4884 - DNA, 172 bp, Artificial Sequence
  Synthetic polynucleotide
atcatctcaccttgcctcctgtaacggattacacgtgccctgcaggtatgcaaatcagatatgcaaatctcgtatgcaaatcgactatgcaaatcctatatgcaaatcacttatgcaaatctgctatgcaaatcgtatatgcaaatcggcgcgccatgcttcatcagactct

SEQ ID NO: 4885 - DNA, 172 bp, Artificial Sequence; identical to SEQ ID NO: 4884
  Synthetic polynucleotide

SEQ ID NO: 4886 - DNA, 190 bp, Artificial Sequence
  Synthetic polynucleotide
atcatctcaccttgcctcctggggtacgagctctgtatcctgcaggtttattgattttttagatttattgatttttttcgtttattgattttttgactttattgattttttctatttattgattttttacttttattgatttttttgctttattgattttttgtaggcgcgccatgcttcatcagactct

SEQ ID NO: 4887 - DNA, 190 bp, Artificial Sequence; identical to SEQ ID NO: 4886
  Synthetic polynucleotide

SEQ ID NO: 4888 - DNA, 185 bp, Artificial Sequence
  Synthetic polynucleotide
atcatctcaccttgcctcctggcagggcatttatgcaccctgcaggccattgttatgcaaatagaccattgttatgcaaattcgccattgttatgcaaatgacccattgttatgcaaatctaccattgttatgcaaatactccattgttatgcaaattgcggcgcgccatgcttcatcagactct

SEQ ID NO: 4889 - DNA, 185 bp, Artificial Sequence; identical to SEQ ID NO: 4888
  Synthetic polynucleotide

SEQ ID NO: 4890 - DNA, 191 bp, Artificial Sequence
  Synthetic polynucleotide
atcatctcaccttgcctcctgaggttgtcaagctgatacctgcagggatacctaattagcgcgagagatacctaattagcgcgtcggatacctaattagcgcggacgatacctaattagcgcgctagatacctaattagcgcgactgatacctaattagcgcgtgcggcgcgccatgcttcatcagactct

SEQ ID NO: 4891 - DNA, 191 bp, Artificial Sequence; identical to SEQ ID NO: 4890
  Synthetic polynucleotide

SEQ ID NO: 4892 - DNA, 180 bp, Artificial Sequence
  Synthetic polynucleotide
atcatctcaccttgcctcctggtacacacatacacgtacctgcaggggccacgtgctagaggccacgtgcttcgggccacgtgctgacggccacgtgctctaggccacgtgctactggccacgtgcttgcggccacgtgctgtaggccacgtgctggcgcgccatgcttcatcagactct

SEQ ID NO: 4893 - DNA, 180 bp, Artificial Sequence; identical to SEQ ID NO: 4892
  Synthetic polynucleotide

SEQ ID NO: 4894 - DNA, 172 bp, Artificial Sequence
  Synthetic polynucleotide
atcatctcaccttgcctcctgaataacgcgtgagggctcctgcaggtatgcaaataagatatgcaaatatcgtatgcaaatagactatgcaaatactatatgcaaataacttatgcaaatatgctatgcaaatagtatatgcaaataggcgcgccatgcttcatcagactct

SEQ ID NO: 4895 - DNA, 172 bp, Artificial Sequence; identical to SEQ ID NO: 4894
  Synthetic polynucleotide

SEQ ID NO: 4896 - DNA, 164 bp, Artificial Sequence
  Synthetic polynucleotide
atcatctcaccttgcctcctggggttatgcttcccagacctgcaggttgacctttagattgaccttttcgttgacctttgacttgacctttctattgacctttactttgaccttttgcttgacctttgtattgacctttggcgcgccatgcttcatcagactct

SEQ ID NO: 4897 - DNA, 164 bp, Artificial Sequence; identical to SEQ ID NO: 4896
  Synthetic polynucleotide

SEQ ID NO: 4898 - DNA, 197 bp, Artificial Sequence
  Synthetic polynucleotide
atcatctcaccttgcctcctgtccattcgtgtgaattgcctgcaggggtgcgggggcggggagaggtgcgggggcggggtcgggtgcgggggcgggggacggtgcgggggcggggctaggtgcgggggcggggactggtgcgggggcggggtgcggtgcgggggcgggggtaggcgcgccatgcttcatcagactct

SEQ ID NO: 4899 - DNA, 197 bp, Artificial Sequence; identical to SEQ ID NO: 4898
  Synthetic polynucleotide

SEQ ID NO: 4900 - DNA, 172 bp, Artificial Sequence
  Synthetic polynucleotide
atcatctcaccttgcctcctggtaagcgcgaagcaagccctgcaggggggggccccagaggggggcccctcgggggggccccgacggggggccccctaggggggccccactggggggcccctgcggggggccccgtaggggggccccggcgcgccatgcttcatcagactct

SEQ ID NO: 4901 - DNA, 172 bp, Artificial Sequence; identical to SEQ ID NO: 4900
  Synthetic polynucleotide

SEQ ID NO: 4902 - DNA, 172 bp, Artificial Sequence
  Synthetic polynucleotide
atcatctcaccttgcctcctgccgaagcatttcacattcctgcaggattgacctctagaattgacctcttcgattgacctctgacattgacctctctaattgacctctactattgacctcttgcattgacctctgtaattgacctctggcgcgccatgcttcatcagactct

SEQ ID NO: 4903 - DNA, 172 bp, Artificial Sequence; identical to SEQ ID NO: 4902
  Synthetic polynucleotide

SEQ ID NO: 4904 - DNA, 148 bp, Artificial Sequence
  Synthetic polynucleotide
atcatctcaccttgcctcctgaactcagccagactgttcctgcaggaaagtcaagaaaagtcatcgaaagtcagacaaagtcactaaaagtcaactaaagtcatgcaaagtcagtaaaagtcaggcgcgccatgcttcatcagactct

SEQ ID NO: 4905 - DNA, 148 bp, Artificial Sequence; identical to SEQ ID NO: 4904
  Synthetic polynucleotide

SEQ ID NO: 4906 - DNA, 188 bp, Artificial Sequence
  Synthetic polynucleotide
atcatctcaccttgcctcctgtatatggcggcatagttcctgcagggttaaatattaaagagttaaatattaatcggttaaatattaagacgttaaatattaactagttaaatattaaactgttaaatattaatgcgttaaatattaagtagttaaatattaaggcgcgccatgcttcatcagactct

SEQ ID NO: 4907 - DNA, 188 bp, Artificial Sequence; identical to SEQ ID NO: 4906
  Synthetic polynucleotide

SEQ ID NO: 4908 - DNA, 191 bp, Artificial Sequence
  Synthetic polynucleotide
atcatctcaccttgcctcctgctatatgattacgaacgcctgcaggtaaactaattagctgagagataaactaattagctgagtcgtaaactaattagctgaggactaaactaattagctgagctataaactaattagctgagacttaaactaattagctgagtgcggcgcgccatgcttcatcagactct

SEQ ID NO: 4909 - DNA, 191 bp, Artificial Sequence; identical to SEQ ID NO: 4908
  Synthetic polynucleotide

SEQ ID NO: 4910 - DNA, 197 bp, Artificial Sequence
  Synthetic polynucleotide
atcatctcaccttgcctcctgctctggtatcgaagacacctgcaggggtttttttttttttagaggttttttttttttttcgggtttttttttttttgacggtttttttttttttctaggtttttttttttttactggttttttttttttttgcggtttttttttttttgtaggcgcgccatgcttcatcagactct

SEQ ID NO: 4911 - DNA, 197 bp, Artificial Sequence; identical to SEQ ID NO: 4910
  Synthetic polynucleotide

SEQ ID NO: 4912 - DNA, 156 bp, Artificial Sequence
  Synthetic polynucleotide
atcatctcaccttgcctcctgaacagaccgccagaatacctgcaggtgaactccagatgaactcctcgtgaactccgactgaactccctatgaactccacttgaactcctgctgaactccgtatgaactccggcgcgccatgcttcatcagactct

SEQ ID NO: 4913 - DNA, 156 bp, Artificial Sequence; identical to SEQ ID NO: 4912
  Synthetic polynucleotide

SEQ ID NO: 4914 - DNA, 172 bp, Artificial Sequence
  Synthetic polynucleotide
atcatctcaccttgcctcctggctactctccgcaaagacctgcagggttaaacggtagagttaaacggttcggttaaacggtgacgttaaacggtctagttaaacggtactgttaaacggttgcgttaaacggtgtagttaaacggtggcgcgccatgcttcatcagactct

SEQ ID NO: 4915 - DNA, 172 bp, Artificial Sequence; identical to SEQ ID NO: 4914
  Synthetic polynucleotide

SEQ ID NO: 4916 - DNA, 191 bp, Artificial Sequence
  Synthetic polynucleotide
atcatctcaccttgcctcctgaatggccgtcaagcatgcctgcaggaaaaagtaaacaaacccagaaaaaagtaaacaaaccctcgaaaaagtaaacaaacccgacaaaaagtaaacaaacccctaaaaaagtaaacaaacccactaaaaagtaaacaaaccctgcggcgcgccatgcttcatcagactct

SEQ ID NO: 4917 - DNA, 191 bp, Artificial Sequence; identical to SEQ ID NO: 4916
  Synthetic polynucleotide

SEQ ID NO: 4918 - DNA, 197 bp, Artificial Sequence
  Synthetic polynucleotide
atcatctcaccttgcctcctgccgtcactgttatagagcctgcaggaggggtcagaggtcaagaaggggtcagaggtcatcgaggggtcagaggtcagacaggggtcagaggtcactaaggggtcagaggtcaactaggggtcagaggtcatgcaggggtcagaggtcagtaggcgcgccatgcttcatcagactct

SEQ ID NO: 4919 - DNA, 197 bp, Artificial Sequence; identical to SEQ ID NO: 4918
  Synthetic polynucleotide

SEQ ID NO: 4920 - DNA, 197 bp, Artificial Sequence
  Synthetic polynucleotide
atcatctcaccttgcctcctggtggcacccaacaacttcctgcaggccgcatagcaacggaagaccgcatagcaacggatcgccgcatagcaacggagacccgcatagcaacggactaccgcatagcaacggaactccgcatagcaacggatgcccgcatagcaacggagtaggcgcgccatgcttcatcagactct

SEQ ID NO: 4921 - DNA, 197 bp, Artificial Sequence; identical to SEQ ID NO: 4920
  Synthetic polynucleotide

SEQ ID NO: 4922 - DNA, 191 bp, Artificial Sequence
  Synthetic polynucleotide
atcatctcaccttgcctcctgacgtcgtatcgcaatttcctgcaggctgggggacccactgctagactgggggacccactgcttcgctgggggacccactgctgacctgggggacccactgctctactgggggacccactgctactctgggggacccactgcttgcggcgcgccatgcttcatcagactct

SEQ ID NO: 4923 - DNA, 191 bp, Artificial Sequence; identical to SEQ ID NO: 4922
  Synthetic polynucleotide

SEQ ID NO: 4924 - DNA, 197 bp, Artificial Sequence
  Synthetic polynucleotide
atcatctcaccttgcctcctgattcgcgtgatagcgcacctgcaggctcaagttcaagttcaccagactcaagttcaagttcacctcgctcaagttcaagttcaccgacctcaagttcaagttcaccctactcaagttcaagttcaccactctcaagttcaagttcacctgcggcgcgccatgcttcatcagactct

SEQ ID NO: 4925 - DNA, 197 bp, Artificial Sequence; identical to SEQ ID NO: 4924
  Synthetic polynucleotide

SEQ ID NO: 4926 - DNA, 148 bp, Artificial Sequence
  Synthetic polynucleotide
atcatctcaccttgcctcctgcagaccgccactgtgaacctgcaggtacgtcaagatacgtcatcgtacgtcagactacgtcactatacgtcaacttacgtcatgctacgtcagtatacgtcaggcgcgccatgcttcatcagactct

SEQ ID NO: 4927 - DNA, 148 bp, Artificial Sequence; identical to SEQ ID NO: 4926
  Synthetic polynucleotide

SEQ ID NO: 4928 - DNA, 172 bp, Artificial Sequence
  Synthetic polynucleotide
atcatctcaccttgcctcctgtttcgcctgcaatcagacctgcaggccaaggtcacagaccaaggtcactcgccaaggtcacgacccaaggtcacctaccaaggtcacactccaaggtcactgcccaaggtcacgtaccaaggtcacggcgcgccatgcttcatcagactct

SEQ ID NO: 4929 - DNA, 172 bp, Artificial Sequence; identical to SEQ ID NO: 4928
  Synthetic polynucleotide

SEQ ID NO: 4930 - DNA, 200 bp, Artificial Sequence
  Synthetic polynucleotide
atcatctcaccttgcctcctgcctcggttatccagagacctgcaggatcaatatgcaaatttcggagaatcaatatgcaaatttcggtcgatcaatatgcaaatttcgggacatcaatatgcaaatttcggctaatcaatatgcaaatttcggactatcaatatgcaaatttcggggcgcgccatgcttcatcagactct

SEQ ID NO: 4931 - DNA, 200 bp, Artificial Sequence; identical to SEQ ID NO: 4930
  Synthetic polynucleotide

SEQ ID NO: 4932 - DNA, 172 bp, Artificial Sequence
  Synthetic polynucleotide
atcatctcaccttgcctcctgactgttagtttcgttcacctgcaggtcaacctgcaagatcaacctgcatcgtcaacctgcagactcaacctgcactatcaacctgcaacttcaacctgcatgctcaacctgcagtatcaacctgcaggcgcgccatgcttcatcagactct

SEQ ID NO: 4933 - DNA, 172 bp, Artificial Sequence; identical to SEQ ID NO: 4932
  Synthetic polynucleotide

SEQ ID NO: 4934 - DNA, 156 bp, Artificial Sequence
  Synthetic polynucleotide
atcatctcaccttgcctcctgggaaactatgctggccgcctgcaggatttgaatagaatttgaattcgatttgaatgacatttgaatctaatttgaatactatttgaattgcatttgaatgtaatttgaatggcgcgccatgcttcatcagactct

SEQ ID NO: 4935 - DNA, 156 bp, Artificial Sequence; identical to SEQ ID NO: 4934
  Synthetic polynucleotide

SEQ ID NO: 4936 - DNA, 188 bp, Artificial Sequence
  Synthetic polynucleotide
atcatctcaccttgcctcctgtgacaagtacagggtgccctgcaggtccaaacgagatagatccaaacgagattcgtccaaacgagatgactccaaacgagatctatccaaacgagatacttccaaacgagattgctccaaacgagatgtatccaaacgagatggcgcgccatgcttcatcagactct

SEQ ID NO: 4937 - DNA, 188 bp, Artificial Sequence; identical to SEQ ID NO: 4936
  Synthetic polynucleotide

SEQ ID NO: 4938 - DNA, 156 bp, Artificial Sequence
  Synthetic polynucleotide
atcatctcaccttgcctcctggtaacttgtagatgaagcctgcaggattttgggagaattttgggtcgattttggggacattttgggctaattttgggactattttgggtgcattttggggtaattttgggggcgcgccatgcttcatcagactct

SEQ ID NO: 4939 - DNA, 156 bp, Artificial Sequence; identical to SEQ ID NO: 4938
  Synthetic polynucleotide

SEQ ID NO: 4940 - DNA, 197 bp, Artificial Sequence
  Synthetic polynucleotide
atcatctcaccttgcctcctgatcggtctcaatctagtcctgcaggcagtttcagtttctcagacagtttcagtttctctcgcagtttcagtttctcgaccagtttcagtttctcctacagtttcagtttctcactcagtttcagtttctctgccagtttcagtttctcgtaggcgcgccatgcttcatcagactct

SEQ ID NO: 4941 - DNA, 197 bp, Artificial Sequence; identical to SEQ ID NO: 4940
  Synthetic polynucleotide

SEQ ID NO: 4942 - DNA, 196 bp, Artificial Sequence
  Synthetic polynucleotide
atcatctcaccttgcctcctgagagtaaaggatgcaaccctgcaggtgctgactcattcagatgctgactcattctcgtgctgactcattcgactgctgactcattcctatgctgactcattcacttgctgactcattctgctgctgactcattcgtatgctgactcattcggcgcgccatgcttcatcagactct

SEQ ID NO: 4943 - DNA, 196 bp, Artificial Sequence; identical to SEQ ID NO: 4942
  Synthetic polynucleotide

SEQ ID NO: 4944 - DNA, 164 bp, Artificial Sequence
  Synthetic polynucleotide
atcatctcaccttgcctcctggaccgggtaattccacgcctgcaggtaattagcgagataattagcgtcgtaattagcggactaattagcgctataattagcgacttaattagcgtgctaattagcggtataattagcgggcgcgccatgcttcatcagactct

SEQ ID NO: 4945 - DNA, 164 bp, Artificial Sequence; identical to SEQ ID NO: 4944
  Synthetic polynucleotide

SEQ ID NO: 4946 - DNA, 172 bp, Artificial Sequence
  Synthetic polynucleotide
atcatctcaccttgcctcctgtttcaatactatctcgccctgcaggatcacgcgatagaatcacgcgattcgatcacgcgatgacatcacgcgatctaatcacgcgatactatcacgcgattgcatcacgcgatgtaatcacgcgatggcgcgccatgcttcatcagactct

SEQ ID NO: 4947 - DNA, 172 bp, Artificial Sequence; identical to SEQ ID NO: 4946
  Synthetic polynucleotide

SEQ ID NO: 4948 - DNA, 172 bp, Artificial Sequence
  Synthetic polynucleotide
atcatctcaccttgcctcctggacacgaagcatataaccctgcaggtttgtttacaagatttgtttacatcgtttgtttacagactttgtttacactatttgtttacaacttttgtttacatgctttgtttacagtatttgtttacaggcgcgccatgcttcatcagactct

SEQ ID NO: 4949 - DNA, 172 bp, Artificial Sequence; identical to SEQ ID NO: 4948
  Synthetic polynucleotide

SEQ ID NO: 4950 - DNA, 190 bp, Artificial Sequence
  Synthetic polynucleotide
atcatctcaccttgcctcctgcattgacctattgggctcctgcaggcattaattattcatagacattaattattcattcgcattaattattcatgaccattaattattcatctacattaattattcatactcattaattattcattgccattaattattcatgtaggcgcgccatgcttcatcagactct

SEQ ID NO: 4951 - DNA, 190 bp, Artificial Sequence; identical to SEQ ID NO: 4950
  Synthetic polynucleotide

SEQ ID NO: 4952 - DNA, 172 bp, Artificial Sequence
  Synthetic polynucleotide
atcatctcaccttgcctcctgggacaataatgcaagatcctgcaggccaatcagaaagaccaatcagaatcgccaatcagaagacccaatcagaactaccaatcagaaactccaatcagaatgcccaatcagaagtaccaatcagaaggcgcgccatgcttcatcagactct

SEQ ID NO: 4953 - DNA, 172 bp, Artificial Sequence; identical to SEQ ID NO: 4952
  Synthetic polynucleotide

SEQ ID NO: 4954 - DNA, 172 bp, Artificial Sequence
  Synthetic polynucleotide
atcatctcaccttgcctcctgattgtgttgttgatgtgcctgcaggccaattaccgagaccaattaccgtcgccaattaccggacccaattaccgctaccaattaccgactccaattaccgtgcccaattaccggtaccaattaccgggcgcgccatgcttcatcagactct

SEQ ID NO: 4955 - DNA, 172 bp, Artificial Sequence; identical to SEQ ID NO: 4954
  Synthetic polynucleotide

SEQ ID NO: 4956 - DNA, 185 bp, Artificial Sequence
  Synthetic polynucleotide
atcatctcaccttgcctcctgcttggtagatccaaatccctgcaggaacactgcaattgttcagaaacactgcaattgttctcgaacactgcaattgttcgacaacactgcaattgttcctaaacactgcaattgttcactaacactgcaattgttctgcggcgcgccatgcttcatcagactct

SEQ ID NO: 4957 - DNA, 185 bp, Artificial Sequence; identical to SEQ ID NO: 4956
  Synthetic polynucleotide

SEQ ID NO: 4958 - DNA, 185 bp, Artificial Sequence
  Synthetic polynucleotide
atcatctcaccttgcctcctggcctcattaacaccgagcctgcaggaaaaatccggatgtacagaaaaaatccggatgtactcgaaaaatccggatgtacgacaaaaatccggatgtacctaaaaaatccggatgtacactaaaaatccggatgtactgcggcgcgccatgcttcatcagactct

SEQ ID NO: 4959 - DNA, 185 bp, Artificial Sequence; identical to SEQ ID NO: 4958
  Synthetic polynucleotide

SEQ ID NO: 4960 - DNA, 179 bp, Artificial Sequence
  Synthetic polynucleotide
atcatctcaccttgcctcctgcgaaaccaggttaaggtcctgcaggattaaatgacacgtcatctttctgagaattaaatgacacgtcatctttctgtcgattaaatgacacgtcatctttctggacattaaatgacacgtcatctttctgctaggcgcgccatgcttcatcagactct

SEQ ID NO: 4961 - DNA, 179 bp, Artificial Sequence; identical to SEQ ID NO: 4960
  Synthetic polynucleotide

SEQ ID NO: 4962 - DNA, 197 bp, Artificial Sequence
  Synthetic polynucleotide
atcatctcaccttgcctcctgctcggatgtgcgtccatcctgcaggcccaacggcggttgggggagacccaacggcggttgggggtcgcccaacggcggttggggggaccccaacggcggttgggggctacccaacggcggttgggggactcccaacggcggttgggggtgcggcgcgccatgcttcatcagactct

SEQ ID NO: 4963 - DNA, 197 bp, Artificial Sequence; identical to SEQ ID NO: 4962
  Synthetic polynucleotide

SEQ ID NO: 4964 - DNA, 156 bp, Artificial Sequence
  Synthetic polynucleotide
atcatctcaccttgcctcctggtatcgctccagctcgtcctgcaggagataagaagaagataagatcgagataagagacagataagactaagataagaactagataagatgcagataagagtaagataagaggcgcgccatgcttcatcagactct

SEQ ID NO: 4965 - DNA, 156 bp, Artificial Sequence; identical to SEQ ID NO: 4964
  Synthetic polynucleotide

SEQ ID NO: 4966 - DNA, 156 bp, Artificial Sequence
  Synthetic polynucleotide
atcatctcaccttgcctcctgacctgttaagctcatagcctgcaggagataaggagaagataaggtcgagataagggacagataaggctaagataaggactagataaggtgcagataagggtaagataaggggcgcgccatgcttcatcagactct

SEQ ID NO: 4967 - DNA, 156 bp, Artificial Sequence; identical to SEQ ID NO: 4966
  Synthetic polynucleotide

SEQ ID NO: 4968 - DNA, 156 bp, Artificial Sequence
  Synthetic polynucleotide
atcatctcaccttgcctcctgcggtctcgaccctacttcctgcaggagagggcgagaagagggcgtcgagagggcggacagagggcgctaagagggcgactagagggcgtgcagagggcggtaagagggcgggcgcgccatgcttcatcagactct

SEQ ID NO: 4969 - DNA, 156 bp, Artificial Sequence; identical to SEQ ID NO: 4968
  Synthetic polynucleotide

SEQ ID NO: 4970 - DNA, 164 bp, Artificial Sequence
  Synthetic polynucleotide
atcatctcaccttgcctcctgttccgctggattagtatcctgcaggaacatcaaaagaaacatcaaatcgaacatcaaagacaacatcaaactaaacatcaaaactaacatcaaatgcaacatcaaagtaaacatcaaaggcgcgccatgcttcatcagactct

SEQ ID NO: 4971 - DNA, 164 bp, Artificial Sequence; identical to SEQ ID NO: 4970
  Synthetic polynucleotide

SEQ ID NO: 4972 - DNA, 191 bp, Artificial Sequence
  Synthetic polynucleotide
atcatctcaccttgcctcctgattaagcgcaagggtcacctgcaggattatttaattaattacagaattatttaattaattactcgattatttaattaattacgacattatttaattaattacctaattatttaattaattacactattatttaattaattactgcggcgcgccatgcttcatcagactct

SEQ ID NO: 4973 - DNA, 191 bp, Artificial Sequence; identical to SEQ ID NO: 4972
  Synthetic polynucleotide

SEQ ID NO: 4974 - DNA, 156 bp, Artificial Sequence
  Synthetic polynucleotide
atcatctcaccttgcctcctgtacttagagggttggtacctgcagggggtgtggagagggtgtggtcggggtgtgggacgggtgtggctagggtgtggactgggtgtggtgcgggtgtgggtagggtgtggggcgcgccatgcttcatcagactct

SEQ ID NO: 4975 - DNA, 156 bp, Artificial Sequence; identical to SEQ ID NO: 4974
  Synthetic polynucleotide

SEQ ID NO: 4976 - DNA, 190 bp, Artificial Sequence
  Synthetic polynucleotide
atcatctcaccttgcctcctggccgtgcattgtaggttcctgcaggttcacgcatgagttagattcacgcatgagtttcgttcacgcatgagttgacttcacgcatgagttctattcacgcatgagttactttcacgcatgagtttgcttcacgcatgagttgtaggcgcgccatgcttcatcagactct

SEQ ID NO: 4977 - DNA, 190 bp, Artificial Sequence; identical to SEQ ID NO: 4976
  Synthetic polynucleotide

SEQ ID NO: 4978 - DNA, 191 bp, Artificial Sequence
  Synthetic polynucleotide
atcatctcaccttgcctcctgcagttgccactgcccaacctgcaggtcaattgacccctgaagagatcaattgacccctgaagtcgtcaattgacccctgaaggactcaattgacccctgaagctatcaattgacccctgaagacttcaattgacccctgaagtgcggcgcgccatgcttcatcagactct

SEQ ID NO: 4979 - DNA, 191 bp, Artificial Sequence; identical to SEQ ID NO: 4978
  Synthetic polynucleotide

SEQ ID NO: 4980 - DNA, 197 bp, Artificial Sequence
  Synthetic polynucleotide
atcatctcaccttgcctcctgtgtctccaacatatccgcctgcaggtggactttggactctagatggactttggactcttcgtggactttggactctgactggactttggactctctatggactttggactctacttggactttggactcttgctggactttggactctgtaggcgcgccatgcttcatcagactct

SEQ ID NO: 4981 - DNA, 197 bp, Artificial Sequence; identical to SEQ ID NO: 4980
  Synthetic polynucleotide

SEQ ID NO: 4982 - DNA, 196 bp, Artificial Sequence
  Synthetic polynucleotide
atcatctcaccttgcctcctgcagttgggaaagtaccacctgcaggagttacgtaattgagaagttacgtaattgtcgagttacgtaattggacagttacgtaattgctaagttacgtaattgactagttacgtaattgtgcagttacgtaattggtaagttacgtaattgggcgcgccatgcttcatcagactct

SEQ ID NO: 4983 - DNA, 196 bp, Artificial Sequence; identical to SEQ ID NO: 4982
  Synthetic polynucleotide

SEQ ID NO: 4984 - DNA, 196 bp, Artificial Sequence
  Synthetic polynucleotide
atcatctcaccttgcctcctgaactgaagaatcggttccctgcaggtgtgtgagtcatcagatgtgtgagtcatctcgtgtgtgagtcatcgactgtgtgagtcatcctatgtgtgagtcatcacttgtgtgagtcatctgctgtgtgagtcatcgtatgtgtgagtcatcggcgcgccatgcttcatcagactct

SEQ ID NO: 4985 - DNA, 196 bp, Artificial Sequence; identical to SEQ ID NO: 4984
  Synthetic polynucleotide

SEQ ID NO: 4986 - DNA, 191 bp, Artificial Sequence
  Synthetic polynucleotide
atcatctcaccttgcctcctgcgccggaaatgctcaaccctgcagggggtacaccgtgtacctagagggtacaccgtgtaccttcggggtacaccgtgtacctgacgggtacaccgtgtacctctagggtacaccgtgtacctactgggtacaccgtgtaccttgcggcgcgccatgcttcatcagactct

SEQ ID NO: 4987 - DNA, 191 bp, Artificial Sequence; identical to SEQ ID NO: 4986
  Synthetic polynucleotide

SEQ ID NO: 4988 - DNA, 172 bp, Artificial Sequence
  Synthetic polynucleotide
atcatctcaccttgcctcctgcgcaaatgcaaaccatccctgcaggaaaccgcaaaagaaaaccgcaaatcgaaaccgcaaagacaaaccgcaaactaaaaccgcaaaactaaaccgcaaatgcaaaccgcaaagtaaaaccgcaaaggcgcgccatgcttcatcagactct

SEQ ID NO: 4989 - DNA, 172 bp, Artificial Sequence; identical to SEQ ID NO: 4988
  Synthetic polynucleotide

SEQ ID NO: 4990 - DNA, 164 bp, Artificial Sequence
  Synthetic polynucleotide
atcatctcaccttgcctcctgacatcatgatcaaaccacctgcaggctcattgtcagactcattgtctcgctcattgtcgacctcattgtcctactcattgtcactctcattgtctgcctcattgtcgtactcattgtcggcgcgccatgcttcatcagactct

SEQ ID NO: 4991 - DNA, 164 bp, Artificial Sequence; identical to SEQ ID NO: 4990
  Synthetic polynucleotide

SEQ ID NO: 4992 - DNA, 156 bp, Artificial Sequence
  Synthetic polynucleotide
atcatctcaccttgcctcctggcacgagcaagcattgccctgcaggattgttttagaattgtttttcgattgttttgacattgttttctaattgttttactattgtttttgcattgttttgtaattgttttggcgcgccatgcttcatcagactct

SEQ ID NO: 4993 - DNA, 156 bp, Artificial Sequence; identical to SEQ ID NO: 4992
  Synthetic polynucleotide

SEQ ID NO: 4994 - DNA, 172 bp, Artificial Sequence
  Synthetic polynucleotide
atcatctcaccttgcctcctggccgacctgtaagcagacctgcaggtgcaggtgtgagatgcaggtgtgtcgtgcaggtgtggactgcaggtgtgctatgcaggtgtgacttgcaggtgtgtgctgcaggtgtggtatgcaggtgtgggcgcgccatgcttcatcagactct

SEQ ID NO: 4995 - DNA, 172 bp, Artificial Sequence; identical to SEQ ID NO: 4994
  Synthetic polynucleotide

SEQ ID NO: 4996 - DNA, 180 bp, Artificial Sequence
  Synthetic polynucleotide
atcatctcaccttgcctcctgtgttgtgccttggatagcctgcagggttttacgagcagagttttacgagctcggttttacgagcgacgttttacgagcctagttttacgagcactgttttacgagctgcgttttacgagcgtagttttacgagcggcgcgccatgcttcatcagactct

SEQ ID NO: 4997 - DNA, 180 bp, Artificial Sequence; identical to SEQ ID NO: 4996
  Synthetic polynucleotide

SEQ ID NO: 4998 - DNA, 197 bp, Artificial Sequence
  Synthetic polynucleotide
atcatctcaccttgcctcctgtatcgctctttattgagcctgcaggggttaataattaccaagaggttaataattaccatcgggttaataattaccagacggttaataattaccactaggttaataattaccaactggttaataattaccatgcggttaataattaccagtaggcgcgccatgcttcatcagactct

SEQ ID NO: 4999 - DNA, 197 bp, Artificial Sequence; identical to SEQ ID NO: 4998
  Synthetic polynucleotide

SEQ ID NO: 5000 - DNA, 180 bp, Artificial Sequence
  Synthetic polynucleotide
atcatctcaccttgcctcctgatggttagttgggcagacctgcaggaaagcgtcgttagaaaagcgtcgtttcgaaagcgtcgttgacaaagcgtcgttctaaaagcgtcgttactaaagcgtcgtttgcaaagcgtcgttgtaaaagcgtcgttggcgcgccatgcttcatcagactct

SEQ ID NO: 5001 - DNA, 180 bp, Artificial Sequence; identical to SEQ ID NO: 5000
  Synthetic polynucleotide

SEQ ID NO: 5002 - DNA, 196 bp, Artificial Sequence
  Synthetic polynucleotide
atcatctcaccttgcctcctgactattgcgcacgcttccctgcaggggggattgcatttagaggggattgcattttcgggggattgcatttgacggggattgcatttctaggggattgcatttactggggattgcattttgcggggattgcatttgtaggggattgcatttggcgcgccatgcttcatcagactct

SEQ ID NO: 5003 - DNA, 196 bp, Artificial Sequence; identical to SEQ ID NO: 5002
  Synthetic polynucleotide

SEQ ID NO: 5004 - DNA, 197 bp, Artificial Sequence
  Synthetic polynucleotide
atcatctcaccttgcctcctggctatcccgatacgtagcctgcaggcagtattgcgtgagtagacagtattgcgtgagttcgcagtattgcgtgagtgaccagtattgcgtgagtctacagtattgcgtgagtactcagtattgcgtgagttgccagtattgcgtgagtgtaggcgcgccatgcttcatcagactct

SEQ ID NO: 5005 - DNA, 197 bp, Artificial Sequence; identical to SEQ ID NO: 5004
  Synthetic polynucleotide

SEQ ID NO: 5006 - DNA, 191 bp, Artificial Sequence
  Synthetic polynucleotide
atcatctcaccttgcctcctgtcctcactattggatatcctgcaggcggatgacctttgacccctgaagacggatgacctttgacccctgatcgcggatgacctttgacccctgagaccggatgacctttgacccctgactacggatgacctttgacccctgaactggcgcgccatgcttcatcagactct

SEQ ID NO: 5007 - DNA, 191 bp, Artificial Sequence; identical to SEQ ID NO: 5006
  Synthetic polynucleotide

SEQ ID NO: 5008 - DNA, 191 bp, Artificial Sequence
  Synthetic polynucleotide
atcatctcaccttgcctcctgtccttctccggttaccgcctgcaggtgacgtgccaggcgaaaagatgacgtgccaggcgaaatcgtgacgtgccaggcgaaagactgacgtgccaggcgaaactatgacgtgccaggcgaaaacttgacgtgccaggcgaaatgcggcgcgccatgcttcatcagactct

SEQ ID NO: 5009 - DNA, 191 bp, Artificial Sequence; identical to SEQ ID NO: 5008
  Synthetic polynucleotide

SEQ ID NO: 5010 - DNA, 188 bp, Artificial Sequence
  Synthetic polynucleotide
atcatctcaccttgcctcctggcaataacagaagatgtcctgcaggggacaggtgttgagaggacaggtgttgtcgggacaggtgttggacggacaggtgttgctaggacaggtgttgactggacaggtgttgtgcggacaggtgttggtaggacaggtgttgggcgcgccatgcttcatcagactct

SEQ ID NO: 5011 - DNA, 188 bp, Artificial Sequence; identical to SEQ ID NO: 5010
  Synthetic polynucleotide

SEQ ID NO: 5012 - DNA, 164 bp, Artificial Sequence
  Synthetic polynucleotide
atcatctcaccttgcctcctgcctcttatagagaaccacctgcaggcagataaggagacagataaggtcgcagataagggaccagataaggctacagataaggactcagataaggtgccagataagggtacagataaggggcgcgccatgcttcatcagactct

SEQ ID NO: 5013 - DNA, 164 bp, Artificial Sequence; identical to SEQ ID NO: 5012
  Synthetic polynucleotide

SEQ ID NO: 5014 - DNA, 196 bp, Artificial Sequence
  Synthetic polynucleotide
atcatctcaccttgcctcctgggagaatcactgaaagacctgcaggtagggccccctctagatagggccccctcttcgtagggccccctctgactagggccccctctctatagggccccctctacttagggccccctcttgctagggccccctctgtatagggccccctctggcgcgccatgcttcatcagactct

SEQ ID NO: 5015 - DNA, 196 bp, Artificial Sequence; identical to SEQ ID NO: 5014
  Synthetic polynucleotide

SEQ ID NO: 5016 - DNA, 164 bp, Artificial Sequence
  Synthetic polynucleotide
atcatctcaccttgcctcctggttagccaaggtgtatgcctgcaggcacacctggagacacacctggtcgcacacctgggaccacacctggctacacacctggactcacacctggtgccacacctgggtacacacctggggcgcgccatgcttcatcagactct

SEQ ID NO: 5017 - DNA, 164 bp, Artificial Sequence; identical to SEQ ID NO: 5016
  Synthetic polynucleotide

SEQ ID NO: 5018 - DNA, 164 bp, Artificial Sequence
  Synthetic polynucleotide
atcatctcaccttgcctcctgctccatcacagctcgcacctgcaggttcaagtggagattcaagtggtcgttcaagtgggacttcaagtggctattcaagtggactttcaagtggtgcttcaagtgggtattcaagtggggcgcgccatgcttcatcagactct

SEQ ID NO: 5019 - DNA, 164 bp, Artificial Sequence; identical to SEQ ID NO: 5018
  Synthetic polynucleotide

SEQ ID NO: 5020 - DNA, 197 bp, Artificial Sequence
  Synthetic polynucleotide
atcatctcaccttgcctcctggacgaaagcctcctactcctgcaggagtcacttcctgctaagaagtcacttcctgctatcgagtcacttcctgctagacagtcacttcctgctactaagtcacttcctgctaactagtcacttcctgctatgcagtcacttcctgctagtaggcgcgccatgcttcatcagactct

SEQ ID NO: 5021 - DNA, 197 bp, Artificial Sequence; identical to SEQ ID NO: 5020
  Synthetic polynucleotide

SEQ ID NO: 5022 - DNA, 200 bp, Artificial Sequence
  Synthetic polynucleotide
atcatctcaccttgcctcctggtgcgcatttccctagacctgcagggggttgtcacgcgatccccagagggttgtcacgcgatcccctcggggttgtcacgcgatccccgacgggttgtcacgcgatccccctagggttgtcacgcgatccccactgggttgtcacgcgatccccggcgcgccatgcttcatcagactct

SEQ ID NO: 5023 - DNA, 200 bp, Artificial Sequence; identical to SEQ ID NO: 5022
  Synthetic polynucleotide

SEQ ID NO: 5024 - DNA, 185 bp, Artificial Sequence
  Synthetic polynucleotide
atcatctcaccttgcctcctgtgtctgacccatatgctcctgcaggcaaattcctcgaaagaagacaaattcctcgaaagatcgcaaattcctcgaaagagaccaaattcctcgaaagactacaaattcctcgaaagaactcaaattcctcgaaagatgcggcgcgccatgcttcatcagactct

SEQ ID NO: 5025 - DNA, 185 bp, Artificial Sequence; identical to SEQ ID NO: 5024
  Synthetic polynucleotide

SEQ ID NO: 5026 - DNA, 180 bp, Artificial Sequence
  Synthetic polynucleotide
atcatctcaccttgcctcctggccgagatcagtcagtacctgcaggctttcactttcagactttcactttctcgctttcactttcgacctttcactttcctactttcactttcactctttcactttctgcctttcactttcgtactttcactttcggcgcgccatgcttcatcagactct

SEQ ID NO: 5027 - DNA, 180 bp, Artificial Sequence; identical to SEQ ID NO: 5026
  Synthetic polynucleotide

SEQ ID NO: 5028 - DNA, 191 bp, Artificial Sequence
  Synthetic polynucleotide
atcatctcaccttgcctcctggagtttggccttactaccctgcagggataattaatcccttccagagataattaatcccttcctcggataattaatcccttccgacgataattaatcccttccctagataattaatcccttccactgataattaatcccttcctgcggcgcgccatgcttcatcagactct

SEQ ID NO: 5029 - DNA, 191 bp, Artificial Sequence; identical to SEQ ID NO: 5028
  Synthetic polynucleotide

SEQ ID NO: 5030 - DNA, 172 bp, Artificial Sequence
  Synthetic polynucleotide
atcatctcaccttgcctcctgcgacggtctgcatacaacctgcaggagccaatcagagaagccaatcagtcgagccaatcaggacagccaatcagctaagccaatcagactagccaatcagtgcagccaatcaggtaagccaatcagggcgcgccatgcttcatcagactct

SEQ ID NO: 5031 - DNA, 172 bp, Artificial Sequence; identical to SEQ ID NO: 5030
  Synthetic polynucleotide

SEQ ID NO: 5032 - DNA, 197 bp, Artificial Sequence
  Synthetic polynucleotide
atcatctcaccttgcctcctgatatctggacgcagagacctgcaggcccccccgggggggtagacccccccgggggggttcgcccccccgggggggtgaccccccccgggggggtctacccccccgggggggtactcccccccgggggggttgccccccccgggggggtgtaggcgcgccatgcttcatcagactct

SEQ ID NO: 5033 - DNA, 197 bp, Artificial Sequence; identical to SEQ ID NO: 5032
  Synthetic polynucleotide

SEQ ID NO: 5034 - DNA, 196 bp, Artificial Sequence
  Synthetic polynucleotide
atcatctcaccttgcctcctgaggcgcgttgcgatatgcctgcaggtatgtcgcgatagagatatgtcgcgatagtcgtatgtcgcgataggactatgtcgcgatagctatatgtcgcgatagacttatgtcgcgatagtgctatgtcgcgataggtatatgtcgcgatagggcgcgccatgcttcatcagactct

SEQ ID NO: 5035 - DNA, 196 bp, Artificial Sequence; identical to SEQ ID NO: 5034
  Synthetic polynucleotide

SEQ ID NO: 5036 - DNA, 197 bp, Artificial Sequence
  Synthetic polynucleotide
atcatctcaccttgcctcctgagacgtagcctgtctcccctgcaggtttggcttcttgccaagaagatttggcttcttgccaagatcgtttggcttcttgccaagagactttggcttcttgccaagactatttggcttcttgccaagaacttttggcttcttgccaagatgcggcgcgccatgcttcatcagactct

SEQ ID NO: 5037 - DNA, 197 bp, Artificial Sequence; identical to SEQ ID NO: 5036
  Synthetic polynucleotide

SEQ ID NO: 5038 - DNA, 180 bp, Artificial Sequence
  Synthetic polynucleotide
atcatctcaccttgcctcctgtccgaggctcgtttggacctgcaggggtcccgcgagagaggtcccgcgagtcgggtcccgcgaggacggtcccgcgagctaggtcccgcgagactggtcccgcgagtgcggtcccgcgaggtaggtcccgcgagggcgcgccatgcttcatcagactct

SEQ ID NO: 5039 - DNA, 180 bp, Artificial Sequence; identical to SEQ ID NO: 5038
  Synthetic polynucleotide

SEQ ID NO: 5040 - DNA, 172 bp, Artificial Sequence
  Synthetic polynucleotide
atcatctcaccttgcctcctggggaatagttccgaggacctgcaggcaaatatttgagacaaatatttgtcgcaaatatttggaccaaatatttgctacaaatatttgactcaaatatttgtgccaaatatttggtacaaatatttgggcgcgccatgcttcatcagactct

SEQ ID NO: 5041 - DNA, 172 bp, Artificial Sequence; identical to SEQ ID NO: 5040
  Synthetic polynucleotide

SEQ ID NO: 5042 - DNA, 164 bp, Artificial Sequence
  Synthetic polynucleotide
atcatctcaccttgcctcctgtatcatcgcgccacgaccctgcaggctgactcatagactgactcattcgctgactcatgacctgactcatctactgactcatactctgactcattgcctgactcatgtactgactcatggcgcgccatgcttcatcagactct

SEQ ID NO: 5043 - DNA, 164 bp, Artificial Sequence; identical to SEQ ID NO: 5042
  Synthetic polynucleotide

SEQ ID NO: 5044 - DNA, 190 bp, Artificial Sequence
  Synthetic polynucleotide
atcatctcaccttgcctcctgtgctatgatgttccgcccctgcaggtaacttcctcttaaagataacttcctcttaatcgtaacttcctcttaagactaacttcctcttaactataacttcctcttaaacttaacttcctcttaatgctaacttcctcttaagtaggcgcgccatgcttcatcagactct

SEQ ID NO: 5045 - DNA, 190 bp, Artificial Sequence; identical to SEQ ID NO: 5044
  Synthetic polynucleotide

SEQ ID NO: 5046 - DNA, 190 bp, Artificial Sequence
  Synthetic polynucleotide
atcatctcaccttgcctcctggcgaacaggataacggccctgcaggcatttacataaacaagacatttacataaacatcgcatttacataaacagaccatttacataaacactacatttacataaacaactcatttacataaacatgccatttacataaacagtaggcgcgccatgcttcatcagactct

SEQ ID NO: 5047 - DNA, 190 bp, Artificial Sequence; identical to SEQ ID NO: 5046
  Synthetic polynucleotide

SEQ ID NO: 5048 - DNA, 196 bp, Artificial Sequence
  Synthetic polynucleotide
atcatctcaccttgcctcctgtcgtagcgaacgtggagcctgcaggtggactttggcctagatggactttggccttcgtggactttggcctgactggactttggcctctatggactttggcctacttggactttggccttgctggactttggcctgtatggactttggcctggcgcgccatgcttcatcagactct

SEQ ID NO: 5049 - DNA, 196 bp, Artificial Sequence; identical to SEQ ID NO: 5048
  Synthetic polynucleotide

SEQ ID NO: 5050 - DNA, 156 bp, Artificial Sequence
  Synthetic polynucleotide
atcatctcaccttgcctcctgagtccacagcgggtagacctgcaggtgacgtcaagatgacgtcatcgtgacgtcagactgacgtcactatgacgtcaacttgacgtcatgctgacgtcagtatgacgtcaggcgcgccatgcttcatcagactct

SEQ ID NO: 5051 - DNA, 156 bp, Artificial Sequence; identical to SEQ ID NO: 5050
  Synthetic polynucleotide

SEQ ID NO: 5052 - DNA, 156 bp, Artificial Sequence
  Synthetic polynucleotide
atcatctcaccttgcctcctgggtgaattattaacgagcctgcaggaaataacaagaaaataacatcgaaataacagacaaataacactaaaataacaactaaataacatgcaaataacagtaaaataacaggcgcgccatgcttcatcagactct

SEQ ID NO: 5053 - DNA, 156 bp, Artificial Sequence; identical to SEQ ID NO: 5052
  Synthetic polynucleotide

SEQ ID NO: 5054 - DNA, 185 bp, Artificial Sequence
  Synthetic polynucleotide
atcatctcaccttgcctcctgtaaatacaggcgaattccctgcaggaacaaccaattaattcagaaacaaccaattaattctcgaacaaccaattaattcgacaacaaccaattaattcctaaacaaccaattaattcactaacaaccaattaattctgcggcgcgccatgcttcatcagactct

SEQ ID NO: 5055 - DNA, 185 bp, Artificial Sequence; identical to SEQ ID NO: 5054
  Synthetic polynucleotide

SEQ ID NO: 5056 - DNA, 172 bp, Artificial Sequence
  Synthetic polynucleotide
atcatctcaccttgcctcctgccgtgtgtctatgcagacctgcaggaccgtttaacagaaccgtttaactcgaccgtttaacgacaccgtttaacctaaccgtttaacactaccgtttaactgcaccgtttaacgtaaccgtttaacggcgcgccatgcttcatcagactct

SEQ ID NO: 5057 - DNA, 172 bp, Artificial Sequence; identical to SEQ ID NO: 5056
  Synthetic polynucleotide

SEQ ID NO: 5058 - DNA, 190 bp, Artificial Sequence
  Synthetic polynucleotide
atcatctcaccttgcctcctgccgctcttgctgcatgtcctgcagggtgccgtgtgcaaaagagtgccgtgtgcaaatcggtgccgtgtgcaaagacgtgccgtgtgcaaactagtgccgtgtgcaaaactgtgccgtgtgcaaatgcgtgccgtgtgcaaagtaggcgcgccatgcttcatcagactct

SEQ ID NO: 5059 - DNA, 190 bp, Artificial Sequence; identical to SEQ ID NO: 5058
  Synthetic polynucleotide

SEQ ID NO: 5060 - DNA, 196 bp, Artificial Sequence
  Synthetic polynucleotide
atcatctcaccttgcctcctgacgtccctcattagttgcctgcagggaggatgagtcacagagaggatgagtcactcggaggatgagtcacgacgaggatgagtcacctagaggatgagtcacactgaggatgagtcactgcgaggatgagtcacgtagaggatgagtcacggcgcgccatgcttcatcagactct

SEQ ID NO: 5061 - DNA, 196 bp, Artificial Sequence; identical to SEQ ID NO: 5060
  Synthetic polynucleotide

SEQ ID NO: 5062 - DNA, 191 bp, Artificial Sequence
  Synthetic polynucleotide
atcatctcaccttgcctcctgacttgtatctgatgccacctgcagggggactacaactcccagcaggagagggactacaactcccagcaggtcggggactacaactcccagcagggacgggactacaactcccagcaggctagggactacaactcccagcaggactggcgcgccatgcttcatcagactct

SEQ ID NO: 5063 - DNA, 191 bp, Artificial Sequence; identical to SEQ ID NO: 5062
  Synthetic polynucleotide

SEQ ID NO: 5064 - DNA, 191 bp, Artificial Sequence
  Synthetic polynucleotide
atcatctcaccttgcctcctgaacttgccggaagattgcctgcaggtgcactaattagtgcacagatgcactaattagtgcactcgtgcactaattagtgcacgactgcactaattagtgcacctatgcactaattagtgcacacttgcactaattagtgcactgcggcgcgccatgcttcatcagactct

SEQ ID NO: 5065 - DNA, 191 bp, Artificial Sequence; identical to SEQ ID NO: 5064
  Synthetic polynucleotide

SEQ ID NO: 5066 - DNA, 148 bp, Artificial Sequence
  Synthetic polynucleotide
atcatctcaccttgcctcctgtctatccgtgactcagccctgcaggatgaaccagaatgaacctcgatgaaccgacatgaaccctaatgaaccactatgaacctgcatgaaccgtaatgaaccggcgcgccatgcttcatcagactct

SEQ ID NO: 5067 - DNA, 148 bp, Artificial Sequence; identical to SEQ ID NO: 5066
  Synthetic polynucleotide

SEQ ID NO: 5068 - DNA, 180 bp, Artificial Sequence
  Synthetic polynucleotide
atcatctcaccttgcctcctgggttatatccttgtatgcctgcaggaccggaaatccagaaccggaaatcctcgaccggaaatccgacaccggaaatccctaaccggaaatccactaccggaaatcctgcaccggaaatccgtaaccggaaatccggcgcgccatgcttcatcagactct

SEQ ID NO: 5069 - DNA, 180 bp, Artificial Sequence; identical to SEQ ID NO: 5068
  Synthetic polynucleotide

SEQ ID NO: 5070 - DNA, 197 bp, Artificial Sequence
  Synthetic polynucleotide
atcatctcaccttgcctcctgggcggaccttgtgaatacctgcaggagtgccacctagtggagaagtgccacctagtggtcgagtgccacctagtgggacagtgccacctagtggctaagtgccacctagtggactagtgccacctagtggtgcagtgccacctagtgggtaggcgcgccatgcttcatcagactct

SEQ ID NO: 5071 - DNA, 197 bp, Artificial Sequence; identical to SEQ ID NO: 5070
  Synthetic polynucleotide

SEQ ID NO: 5072 - DNA, 197 bp, Artificial Sequence
  Synthetic polynucleotide
atcatctcaccttgcctcctgggcctattagatagtatcctgcaggaaccgttaaacggtcagaaaccgttaaacggtctcgaaccgttaaacggtcgacaaccgttaaacggtcctaaaccgttaaacggtcactaaccgttaaacggtctgcaaccgttaaacggtcgtaggcgcgccatgcttcatcagactct

SEQ ID NO: 5073 - DNA, 197 bp, Artificial Sequence; identical to SEQ ID NO: 5072
  Synthetic polynucleotide

SEQ ID NO: 5074 - DNA, 196 bp, Artificial Sequence
  Synthetic polynucleotide
atcatctcaccttgcctcctgttgcgagaggcttcaatcctgcaggtgaccttgaacttagatgaccttgaactttcgtgaccttgaacttgactgaccttgaacttctatgaccttgaacttacttgaccttgaactttgctgaccttgaacttgtatgaccttgaacttggcgcgccatgcttcatcagactct

SEQ ID NO: 5075 - DNA, 196 bp, Artificial Sequence; identical to SEQ ID NO: 5074
  Synthetic polynucleotide

SEQ ID NO: 5076 - DNA, 148 bp, Artificial Sequence
  Synthetic polynucleotide
atcatctcaccttgcctcctgcgtcaacgatcgatcaccctgcaggggaaattagaggaaatttcgggaaattgacggaaattctaggaaattactggaaatttgcggaaattgtaggaaattggcgcgccatgcttcatcagactct

SEQ ID NO: 5077 - DNA, 148 bp, Artificial Sequence; identical to SEQ ID NO: 5076
  Synthetic polynucleotide

SEQ ID NO: 5078 - DNA, 190 bp, Artificial Sequence
  Synthetic polynucleotide
atcatctcaccttgcctcctgacatttcccattgtcaacctgcaggccataaaactgtcaagaccataaaactgtcatcgccataaaactgtcagacccataaaactgtcactaccataaaactgtcaactccataaaactgtcatgcccataaaactgtcagtaggcgcgccatgcttcatcagactct

SEQ ID NO: 5079 - DNA, 190 bp, Artificial Sequence; identical to SEQ ID NO: 5078
  Synthetic polynucleotide

SEQ ID NO: 5080 - DNA, 196 bp, Artificial Sequence
  Synthetic polynucleotide
atcatctcaccttgcctcctggcattcctcgatgcaagcctgcaggaaatgcaatccccagaaaatgcaatcccctcgaaatgcaatccccgacaaatgcaatccccctaaaatgcaatccccactaaatgcaatcccctgcaaatgcaatccccgtaaaatgcaatccccggcgcgccatgcttcatcagactct

SEQ ID NO: 5081 - DNA, 196 bp, Artificial Sequence; identical to SEQ ID NO: 5080
  Synthetic polynucleotide

SEQ ID NO: 5082 - DNA, 180 bp, Artificial Sequence
  Synthetic polynucleotide
atcatctcaccttgcctcctgcggtcagtccattattccctgcaggggccacgtggtagaggccacgtggttcgggccacgtggtgacggccacgtggtctaggccacgtggtactggccacgtggttgcggccacgtggtgtaggccacgtggtggcgcgccatgcttcatcagactct

SEQ ID NO: 5083 - DNA, 180 bp, Artificial Sequence; identical to SEQ ID NO: 5082
  Synthetic polynucleotide

SEQ ID NO: 5084 - DNA, 191 bp, Artificial Sequence
  Synthetic polynucleotide
atcatctcaccttgcctcctgcggagagttgctgagtccctgcaggggtcccgcccccttctcagaggtcccgcccccttctctcgggtcccgcccccttctcgacggtcccgcccccttctcctaggtcccgcccccttctcactggtcccgcccccttctctgcggcgcgccatgcttcatcagactct

SEQ ID NO: 5085 - DNA, 191 bp, Artificial Sequence; identical to SEQ ID NO: 5084
  Synthetic polynucleotide

SEQ ID NO: 5086 - DNA, 140 bp, Artificial Sequence
  Synthetic polynucleotide
atcatctcaccttgcctcctgctttaggtatggagtcgcctgcaggcaattaagacaattatcgcaattagaccaattactacaattaactcaattatgccaattagtacaattaggcgcgccatgcttcatcagactct

SEQ ID NO: 5087 - DNA, 140 bp, Artificial Sequence; identical to SEQ ID NO: 5086
  Synthetic polynucleotide

SEQ ID NO: 5088 - DNA, 172 bp, Artificial Sequence
  Synthetic polynucleotide
atcatctcaccttgcctcctgacttctgtttcgaggtccctgcagggcggattaggagagcggattaggtcggcggattagggacgcggattaggctagcggattaggactgcggattaggtgcgcggattagggtagcggattaggggcgcgccatgcttcatcagactct

SEQ ID NO: 5089 - DNA, 172 bp, Artificial Sequence; identical to SEQ ID NO: 5088
  Synthetic polynucleotide

SEQ ID NO: 5090 - DNA, 164 bp, Artificial Sequence
  Synthetic polynucleotide
atcatctcaccttgcctcctgcagtgccttgcaagccacctgcaggttatcgattagattatcgatttcgttatcgattgacttatcgattctattatcgattactttatcgatttgcttatcgattgtattatcgattggcgcgccatgcttcatcagactct

SEQ ID NO: 5091 - DNA, 164 bp, Artificial Sequence; identical to SEQ ID NO: 5090
  Synthetic polynucleotide

SEQ ID NO: 5092 - DNA, 164 bp, Artificial Sequence
  Synthetic polynucleotide
atcatctcaccttgcctcctgctgtttcttcaagcctgcctgcaggttaattaccagattaattacctcgttaattaccgacttaattaccctattaattaccactttaattacctgcttaattaccgtattaattaccggcgcgccatgcttcatcagactct

SEQ ID NO: 5093 - DNA, 164 bp, Artificial Sequence; identical to SEQ ID NO: 5092
  Synthetic polynucleotide

SEQ ID NO: 5094 - DNA, 172 bp, Artificial Sequence
  Synthetic polynucleotide
atcatctcaccttgcctcctgtgacgcttgcgttacagcctgcaggccacgtgatcagaccacgtgatctcgccacgtgatcgacccacgtgatcctaccacgtgatcactccacgtgatctgcccacgtgatcgtaccacgtgatcggcgcgccatgcttcatcagactct

SEQ ID NO: 5095 - DNA, 172 bp, Artificial Sequence; identical to SEQ ID NO: 5094
  Synthetic polynucleotide

SEQ ID NO: 5096 - DNA, 172 bp, Artificial Sequence
  Synthetic polynucleotide
atcatctcaccttgcctcctgagtaggtttctttacgccctgcaggaccggaagtaagaaccggaagtatcgaccggaagtagacaccggaagtactaaccggaagtaactaccggaagtatgcaccggaagtagtaaccggaagtaggcgcgccatgcttcatcagactct

SEQ ID NO: 5097 - DNA, 172 bp, Artificial Sequence; identical to SEQ ID NO: 5096
  Synthetic polynucleotide

SEQ ID NO: 5098 - DNA, 191 bp, Artificial Sequence
  Synthetic polynucleotide
atcatctcaccttgcctcctgcagtactgatgagagttcctgcaggccgctcccagcggctgcagaccgctcccagcggctgctcgccgctcccagcggctgcgacccgctcccagcggctgcctaccgctcccagcggctgcactccgctcccagcggctgctgcggcgcgccatgcttcatcagactct

SEQ ID NO: 5099 - DNA, 191 bp, Artificial Sequence; identical to SEQ ID NO: 5098
  Synthetic polynucleotide

SEQ ID NO: 5100 - DNA, 172 bp, Artificial Sequence
  Synthetic polynucleotide
atcatctcaccttgcctcctgtcttaacgatgtactcacctgcaggacagataaggagaacagataaggtcgacagataagggacacagataaggctaacagataaggactacagataaggtgcacagataagggtaacagataaggggcgcgccatgcttcatcagactct

SEQ ID NO: 5101 - DNA, 172 bp, Artificial Sequence; identical to SEQ ID NO: 5100
  Synthetic polynucleotide

SEQ ID NO: 5102 - DNA, 191 bp, Artificial Sequence
  Synthetic polynucleotide
atcatctcaccttgcctcctgtaaagagtgcaagtcgtcctgcagggggaacattgtgttcccagagggaacattgtgttccctcggggaacattgtgttcccgacgggaacattgtgttcccctagggaacattgtgttcccactgggaacattgtgttccctgcggcgcgccatgcttcatcagactct

SEQ ID NO: 5103 - DNA, 191 bp, Artificial Sequence; identical to SEQ ID NO: 5102
  Synthetic polynucleotide

SEQ ID NO: 5104 - DNA, 196 bp, Artificial Sequence
  Synthetic polynucleotide
atcatctcaccttgcctcctgaagcgttggttctagcccctgcaggggaaccggaagtgagaggaaccggaagtgtcgggaaccggaagtggacggaaccggaagtgctaggaaccggaagtgactggaaccggaagtgtgcggaaccggaagtggtaggaaccggaagtgggcgcgccatgcttcatcagactct

SEQ ID NO: 5105 - DNA, 196 bp, Artificial Sequence; identical to SEQ ID NO: 5104
  Synthetic polynucleotide

SEQ ID NO: 5106 - DNA, 190 bp, Artificial Sequence
  Synthetic polynucleotide
atcatctcaccttgcctcctgctatacttactttgccccctgcaggaaagttttattgccagaaaagttttattgcctcgaaagttttattgccgacaaagttttattgccctaaaagttttattgccactaaagttttattgcctgcaaagttttattgccgtaggcgcgccatgcttcatcagactct

SEQ ID NO: 5107 - DNA, 190 bp, Artificial Sequence; identical to SEQ ID NO: 5106
  Synthetic polynucleotide

SEQ ID NO: 5108 - DNA, 180 bp, Artificial Sequence
  Synthetic polynucleotide
atcatctcaccttgcctcctgcttaatgcgtgagttagcctgcaggggccacgtggcagaggccacgtggctcgggccacgtggcgacggccacgtggcctaggccacgtggcactggccacgtggctgcggccacgtggcgtaggccacgtggcggcgcgccatgcttcatcagactct

SEQ ID NO: 5109 - DNA, 180 bp, Artificial Sequence; identical to SEQ ID NO: 5108
  Synthetic polynucleotide

SEQ ID NO: 5110 - DNA, 185 bp, Artificial Sequence
  Synthetic polynucleotide
atcatctcaccttgcctcctgctccaataggaaactagcctgcaggttgagttaattaacctagattgagttaattaaccttcgttgagttaattaacctgacttgagttaattaacctctattgagttaattaacctactttgagttaattaaccttgcggcgcgccatgcttcatcagactct

SEQ ID NO: 5111 - DNA, 185 bp, Artificial Sequence; identical to SEQ ID NO: 5110
  Synthetic polynucleotide

SEQ ID NO: 5112 - DNA, 172 bp, Artificial Sequence
  Synthetic polynucleotide
atcatctcaccttgcctcctgtgtagcttacactgagtcctgcaggaccggaagtgagaaccggaagtgtcgaccggaagtggacaccggaagtgctaaccggaagtgactaccggaagtgtgcaccggaagtggtaaccggaagtgggcgcgccatgcttcatcagactct

SEQ ID NO: 5113 - DNA, 172 bp, Artificial Sequence; identical to SEQ ID NO: 5112
  Synthetic polynucleotide

SEQ ID NO: 5114 - DNA, 156 bp, Artificial Sequence
  Synthetic polynucleotide
atcatctcaccttgcctcctgtaagttgcctgctagggcctgcaggggcaattaagaggcaattatcgggcaattagacggcaattactaggcaattaactggcaattatgcggcaattagtaggcaattaggcgcgccatgcttcatcagactct

SEQ ID NO: 5115 - DNA, 156 bp, Artificial Sequence; identical to SEQ ID NO: 5114
  Synthetic polynucleotide

SEQ ID NO: 5116 - DNA, 172 bp, Artificial Sequence
  Synthetic polynucleotide
atcatctcaccttgcctcctgacatggcgcgatctctccctgcaggacagataagaagaacagataagatcgacagataagagacacagataagactaacagataagaactacagataagatgcacagataagagtaacagataagaggcgcgccatgcttcatcagactct

SEQ ID NO: 5117 - DNA, 172 bp, Artificial Sequence; identical to SEQ ID NO: 5116
  Synthetic polynucleotide

SEQ ID NO: 5118 - DNA, 191 bp, Artificial Sequence
  Synthetic polynucleotide
atcatctcaccttgcctcctgcgctatttacagtacggcctgcaggtgtcgtgaccccttaatagatgtcgtgaccccttaattcgtgtcgtgaccccttaatgactgtcgtgaccccttaatctatgtcgtgaccccttaatacttgtcgtgaccccttaattgcggcgcgccatgcttcatcagactct

SEQ ID NO: 5119 - DNA, 191 bp, Artificial Sequence; identical to SEQ ID NO: 5118
  Synthetic polynucleotide

SEQ ID NO: 5120 - DNA, 200 bp, Artificial Sequence
  Synthetic polynucleotide
atcatctcaccttgcctcctgtgtctacaaggttaagtcctgcaggagtttcgatatgagtcatcagaagtttcgatatgagtcatctcgagtttcgatatgagtcatcgacagtttcgatatgagtcatcctaagtttcgatatgagtcatcactagtttcgatatgagtcatcggcgcgccatgcttcatcagactct

SEQ ID NO: 5121 - DNA, 200 bp, Artificial Sequence; identical to SEQ ID NO: 5120
  Synthetic polynucleotide

SEQ ID NO: 5122 - DNA, 191 bp, Artificial Sequence
  Synthetic polynucleotide
atcatctcaccttgcctcctgagagatgtcgtcgtatccctgcagggggtcacttcaggtcagagagggtcacttcaggtcagtcggggtcacttcaggtcaggacgggtcacttcaggtcagctagggtcacttcaggtcagactgggtcacttcaggtcagtgcggcgcgccatgcttcatcagactct

SEQ ID NO: 5123 - DNA, 191 bp, Artificial Sequence; identical to SEQ ID NO: 5122
  Synthetic polynucleotide

SEQ ID NO: 5124 - DNA, 197 bp, Artificial Sequence
  Synthetic polynucleotide
atcatctcaccttgcctcctgcataaggatatcgcactcctgcaggtttggaaatccccttagatttggaaatcccctttcgtttggaaatccccttgactttggaaatccccttctatttggaaatccccttacttttggaaatcccctttgctttggaaatccccttgtaggcgcgccatgcttcatcagactct

SEQ ID NO: 5125 - DNA, 197 bp, Artificial Sequence; identical to SEQ ID NO: 5124
  Synthetic polynucleotide

SEQ ID NO: 5126 - DNA, 172 bp, Artificial Sequence
  Synthetic polynucleotide
atcatctcaccttgcctcctgtctaacattgccggagccctgcaggcctcaggcgaagacctcaggcgatcgcctcaggcgagaccctcaggcgactacctcaggcgaactcctcaggcgatgccctcaggcgagtacctcaggcgaggcgcgccatgcttcatcagactct

SEQ ID NO: 5127 - DNA, 172 bp, Artificial Sequence; identical to SEQ ID NO: 5126
  Synthetic polynucleotide

SEQ ID NO: 5128 - DNA, 188 bp, Artificial Sequence
  Synthetic polynucleotide
atcatctcaccttgcctcctgcgctaggaaacctcattcctgcagggagcacgtggttagagagcacgtggtttcggagcacgtggttgacgagcacgtggttctagagcacgtggttactgagcacgtggtttgcgagcacgtggttgtagagcacgtggttggcgcgccatgcttcatcagactct

SEQ ID NO: 5129 - DNA, 188 bp, Artificial Sequence; identical to SEQ ID NO: 5128
  Synthetic polynucleotide

SEQ ID NO: 5130 - DNA, 191 bp, Artificial Sequence
  Synthetic polynucleotide
atcatctcaccttgcctcctgtcctagctacaagttcacctgcaggatctaagttatctcttaagaatctaagttatctcttatcgatctaagttatctcttagacatctaagttatctcttactaatctaagttatctcttaactatctaagttatctcttatgcggcgcgccatgcttcatcagactct

SEQ ID NO: 5131 - DNA, 191 bp, Artificial Sequence; identical to SEQ ID NO: 5130
  Synthetic polynucleotide

SEQ ID NO: 5132 - DNA, 197 bp, Artificial Sequence
  Synthetic polynucleotide
atcatctcaccttgcctcctggaatccctaggacaagccctgcaggccaactttcgatttcctaagaccaactttcgatttcctatcgccaactttcgatttcctagacccaactttcgatttcctactaccaactttcgatttcctaactccaactttcgatttcctatgcggcgcgccatgcttcatcagactct

SEQ ID NO: 5133 - DNA, 197 bp, Artificial Sequence; identical to SEQ ID NO: 5132
  Synthetic polynucleotide

SEQ ID NO: 5134 - DNA, 164 bp, Artificial Sequence
  Synthetic polynucleotide
atcatctcaccttgcctcctgaatcaacccacccgttccctgcaggaccagctgcagaaccagctgctcgaccagctgcgacaccagctgcctaaccagctgcactaccagctgctgcaccagctgcgtaaccagctgcggcgcgccatgcttcatcagactct

SEQ ID NO: 5135 - DNA, 164 bp, Artificial Sequence; identical to SEQ ID NO: 5134
  Synthetic polynucleotide

SEQ ID NO: 5136 - DNA, 191 bp, Artificial Sequence
  Synthetic polynucleotide
atcatctcaccttgcctcctggtctagtactttggtcccctgcaggaaggtcaccagaggtcaagaaaggtcaccagaggtcatcgaaggtcaccagaggtcagacaaggtcaccagaggtcactaaaggtcaccagaggtcaactaaggtcaccagaggtcatgcggcgcgccatgcttcatcagactct

SEQ ID NO: 5137 - DNA, 191 bp, Artificial Sequence; identical to SEQ ID NO: 5136
  Synthetic polynucleotide

SEQ ID NO: 5138 - DNA, 197 bp, Artificial Sequence
  Synthetic polynucleotide
atcatctcaccttgcctcctgcggatctctgttgcaagcctgcaggttaattagcgctaattagagattaattagcgctaattagtcgttaattagcgctaattaggacttaattagcgctaattagctattaattagcgctaattagactttaattagcgctaattagtgcggcgcgccatgcttcatcagactct

SEQ ID NO: 5139 - DNA, 197 bp, Artificial Sequence; identical to SEQ ID NO: 5138
  Synthetic polynucleotide

SEQ ID NO: 5140 - DNA, 164 bp, Artificial Sequence
  Synthetic polynucleotide
atcatctcaccttgcctcctgtaccttcatcacttcaacctgcaggtgggtggtcagatgggtggtctcgtgggtggtcgactgggtggtcctatgggtggtcacttgggtggtctgctgggtggtcgtatgggtggtcggcgcgccatgcttcatcagactct

SEQ ID NO: 5141 - DNA, 164 bp, Artificial Sequence; identical to SEQ ID NO: 5140
  Synthetic polynucleotide

SEQ ID NO: 5142 - DNA, 196 bp, Artificial Sequence
  Synthetic polynucleotide
atcatctcaccttgcctcctgttattgaagggccgtggcctgcaggtgcataaattatgagatgcataaattatgtcgtgcataaattatggactgcataaattatgctatgcataaattatgacttgcataaattatgtgctgcataaattatggtatgcataaattatgggcgcgccatgcttcatcagactct

SEQ ID NO: 5143 - DNA, 196 bp, Artificial Sequence; identical to SEQ ID NO: 5142
  Synthetic polynucleotide

SEQ ID NO: 5144 - DNA, 156 bp, Artificial Sequence
  Synthetic polynucleotide
atcatctcaccttgcctcctgtatccgtgtatgggagccctgcaggtgacgtacagatgacgtactcgtgacgtacgactgacgtacctatgacgtacacttgacgtactgctgacgtacgtatgacgtacggcgcgccatgcttcatcagactct

SEQ ID NO: 5145 - DNA, 156 bp, Artificial Sequence; identical to SEQ ID NO: 5144
  Synthetic polynucleotide

SEQ ID NO: 5146 - DNA, 191 bp, Artificial Sequence
  Synthetic polynucleotide
atcatctcaccttgcctcctgggattattatctagccccctgcaggaatgactgcaattcattagaaatgactgcaattcatttcgaatgactgcaattcattgacaatgactgcaattcattctaaatgactgcaattcattactaatgactgcaattcatttgcggcgcgccatgcttcatcagactct

SEQ ID NO: 5147 - DNA, 191 bp, Artificial Sequence; identical to SEQ ID NO: 5146
  Synthetic polynucleotide

SEQ ID NO: 5148 - DNA, 172 bp, Artificial Sequence
  Synthetic polynucleotide
atcatctcaccttgcctcctgagagtgcggcgttatcgcctgcaggtgctaccgttagatgctaccgtttcgtgctaccgttgactgctaccgttctatgctaccgttacttgctaccgtttgctgctaccgttgtatgctaccgttggcgcgccatgcttcatcagactct

SEQ ID NO: 5149 - DNA, 172 bp, Artificial Sequence; identical to SEQ ID NO: 5148
  Synthetic polynucleotide

SEQ ID NO: 5150 - DNA, 190 bp, Artificial Sequence
  Synthetic polynucleotide
atcatctcaccttgcctcctgagatgatcggtctgggtcctgcaggccatataaggcaaaagaccatataaggcaaatcgccatataaggcaaagacccatataaggcaaactaccatataaggcaaaactccatataaggcaaatgcccatataaggcaaagtaggcgcgccatgcttcatcagactct

SEQ ID NO: 5151 - DNA, 190 bp, Artificial Sequence; identical to SEQ ID NO: 5150
  Synthetic polynucleotide

SEQ ID NO: 5152 - DNA, 172 bp, Artificial Sequence
  Synthetic polynucleotide
atcatctcaccttgcctcctgcttcgcataacccttatcctgcaggccacagcaggagaccacagcaggtcgccacagcagggacccacagcaggctaccacagcaggactccacagcaggtgcccacagcagggtaccacagcaggggcgcgccatgcttcatcagactct

SEQ ID NO: 5153 - DNA, 172 bp, Artificial Sequence; identical to SEQ ID NO: 5152
  Synthetic polynucleotide

SEQ ID NO: 5154 - DNA, 197 bp, Artificial Sequence
  Synthetic polynucleotide
atcatctcaccttgcctcctgaggtgtctatccaactgcctgcaggaaagaggaagtgaaaagaaaagaggaagtgaaatcgaaagaggaagtgaaagacaaagaggaagtgaaactaaaagaggaagtgaaaactaaagaggaagtgaaatgcaaagaggaagtgaaagtaggcgcgccatgcttcatcagactct

SEQ ID NO: 5155 - DNA, 197 bp, Artificial Sequence; identical to SEQ ID NO: 5154
  Synthetic polynucleotide

SEQ ID NO: 5156 - DNA, 188 bp, Artificial Sequence
  Synthetic polynucleotide
atcatctcaccttgcctcctgatgtctgatgctcaagtcctgcagggaaatccccagcagagaaatccccagctcggaaatccccagcgacgaaatccccagcctagaaatccccagcactgaaatccccagctgcgaaatccccagcgtagaaatccccagcggcgcgccatgcttcatcagactct

SEQ ID NO: 5157 - DNA, 188 bp, Artificial Sequence; identical to SEQ ID NO: 5156
  Synthetic polynucleotide

SEQ ID NO: 5158 - DNA, 196 bp, Artificial Sequence
  Synthetic polynucleotide
atcatctcaccttgcctcctggacacacgttcgttgggcctgcaggttacttccgggttagattacttccgggtttcgttacttccgggttgacttacttccgggttctattacttccgggttactttacttccgggtttgcttacttccgggttgtattacttccgggttggcgcgccatgcttcatcagactct

SEQ ID NO: 5159 - DNA, 196 bp, Artificial Sequence; identical to SEQ ID NO: 5158
  Synthetic polynucleotide

SEQ ID NO: 5160 - DNA, 156 bp, Artificial Sequence
  Synthetic polynucleotide
atcatctcaccttgcctcctgtcctggtcacgttagtgcctgcaggccacacccagaccacaccctcgccacacccgacccacacccctaccacacccactccacaccctgcccacacccgtaccacacccggcgcgccatgcttcatcagactct

SEQ ID NO: 5161 - DNA, 156 bp, Artificial Sequence; identical to SEQ ID NO: 5160
  Synthetic polynucleotide

SEQ ID NO: 5162 - DNA, 180 bp, Artificial Sequence
  Synthetic polynucleotide
atcatctcaccttgcctcctgcaccgccaaagagaatccctgcaggacaggtgttttagaacaggtgtttttcgacaggtgttttgacacaggtgttttctaacaggtgttttactacaggtgtttttgcacaggtgttttgtaacaggtgttttggcgcgccatgcttcatcagactct

SEQ ID NO: 5163 - DNA, 180 bp, Artificial Sequence; identical to SEQ ID NO: 5162
  Synthetic polynucleotide

SEQ ID NO: 5164 - DNA, 185 bp, Artificial Sequence
  Synthetic polynucleotide
atcatctcaccttgcctcctgacctcataagatcctgtcctgcaggttttagaacaattgaaagattttagaacaattgaatcgttttagaacaattgaagacttttagaacaattgaactattttagaacaattgaaactttttagaacaattgaatgcggcgcgccatgcttcatcagactct

SEQ ID NO: 5165 - DNA, 185 bp, Artificial Sequence; identical to SEQ ID NO: 5164
  Synthetic polynucleotide

SEQ ID NO: 5166 - DNA, 156 bp, Artificial Sequence
  Synthetic polynucleotide
atcatctcaccttgcctcctgcctcatgtgttaggcgtcctgcagggacttcctagagacttccttcggacttcctgacgacttcctctagacttcctactgacttccttgcgacttcctgtagacttcctggcgcgccatgcttcatcagactct

SEQ ID NO: 5167 - DNA, 156 bp, Artificial Sequence; identical to SEQ ID NO: 5166
  Synthetic polynucleotide

SEQ ID NO: 5168 - DNA, 164 bp, Artificial Sequence
  Synthetic polynucleotide
atcatctcaccttgcctcctgataatcaccgacacacccctgcaggtctcccaaaagatctcccaaatcgtctcccaaagactctcccaaactatctcccaaaacttctcccaaatgctctcccaaagtatctcccaaaggcgcgccatgcttcatcagactct

SEQ ID NO: 5169 - DNA, 164 bp, Artificial Sequence; identical to SEQ ID NO: 5168
  Synthetic polynucleotide

SEQ ID NO: 5170 - DNA, 191 bp, Artificial Sequence
  Synthetic polynucleotide
atcatctcaccttgcctcctgctcaggtccattaagctcctgcaggagcgctaattggtcttcagaagcgctaattggtcttctcgagcgctaattggtcttcgacagcgctaattggtcttcctaagcgctaattggtcttcactagcgctaattggtcttctgcggcgcgccatgcttcatcagactct

SEQ ID NO: 5171 - DNA, 191 bp, Artificial Sequence; identical to SEQ ID NO: 5170
  Synthetic polynucleotide

SEQ ID NO: 5172 - DNA, 172 bp, Artificial Sequence
  Synthetic polynucleotide
atcatctcaccttgcctcctgatatcagttaccacgagcctgcaggaattaattaaagaaattaattaatcgaattaattaagacaattaattaactaaattaattaaactaattaattaatgcaattaattaagtaaattaattaaggcgcgccatgcttcatcagactct

SEQ ID NO: 5173 - DNA, 172 bp, Artificial Sequence; identical to SEQ ID NO: 5172
  Synthetic polynucleotide

SEQ ID NO: 5174 - DNA, 196 bp, Artificial Sequence
  Synthetic polynucleotide
atcatctcaccttgcctcctgactctaccctaacggtccctgcaggtaattgccaattaagataattgccaattatcgtaattgccaattagactaattgccaattactataattgccaattaacttaattgccaattatgctaattgccaattagtataattgccaattaggcgcgccatgcttcatcagactct

SEQ ID NO: 5175 - DNA, 196 bp, Artificial Sequence; identical to SEQ ID NO: 5174
  Synthetic polynucleotide

SEQ ID NO: 5176 - DNA, 188 bp, Artificial Sequence
  Synthetic polynucleotide
atcatctcaccttgcctcctgttgtgcgggtgaccctacctgcaggggcagacaggctagaggcagacaggcttcgggcagacaggctgacggcagacaggctctaggcagacaggctactggcagacaggcttgcggcagacaggctgtaggcagacaggctggcgcgccatgcttcatcagactct

SEQ ID NO: 5177 - DNA, 188 bp, Artificial Sequence; identical to SEQ ID NO: 5176
  Synthetic polynucleotide

SEQ ID NO: 5178 - DNA, 172 bp, Artificial Sequence
  Synthetic polynucleotide
atcatctcaccttgcctcctgagctaccggccaaatggcctgcaggaattaattagagaaattaattagtcgaattaattaggacaattaattagctaaattaattagactaattaattagtgcaattaattaggtaaattaattagggcgcgccatgcttcatcagactct

SEQ ID NO: 5179 - DNA, 172 bp, Artificial Sequence; identical to SEQ ID NO: 5178
  Synthetic polynucleotide

SEQ ID NO: 5180 - DNA, 172 bp, Artificial Sequence
  Synthetic polynucleotide
atcatctcaccttgcctcctgagatagcgcagccatgtcctgcaggatcatgtaatagaatcatgtaattcgatcatgtaatgacatcatgtaatctaatcatgtaatactatcatgtaattgcatcatgtaatgtaatcatgtaatggcgcgccatgcttcatcagactct

SEQ ID NO: 5181 - DNA, 172 bp, Artificial Sequence; identical to SEQ ID NO: 5180
  Synthetic polynucleotide

SEQ ID NO: 5182 - DNA, 180 bp, Artificial Sequence
  Synthetic polynucleotide
atcatctcaccttgcctcctgcattctcgaggcagtgccctgcagggccgccattatagagccgccattattcggccgccattatgacgccgccattatctagccgccattatactgccgccattattgcgccgccattatgtagccgccattatggcgcgccatgcttcatcagactct

SEQ ID NO: 5183 - DNA, 180 bp, Artificial Sequence; identical to SEQ ID NO: 5182
  Synthetic polynucleotide

SEQ ID NO: 5184 - DNA, 183 bp, Artificial Sequence
  Synthetic polynucleotide
atcatctcaccttgcctcctggtgcttcacaatcaacccctgcaggatttcacacctaggtgtcactatgtagaatttcacacctaggtgtcactatgttcgatttcacacctaggtgtcactatgtgacatttcacacctaggtgtcactatgtctaggcgcgccatgcttcatcagactct

SEQ ID NO: 5185 - DNA, 183 bp, Artificial Sequence; identical to SEQ ID NO: 5184
  Synthetic polynucleotide

SEQ ID NO: 5186 - DNA, 180 bp, Artificial Sequence
  Synthetic polynucleotide
atcatctcaccttgcctcctgtaatggacgtcgaccgtcctgcaggaccatctgccgagaaccatctgccgtcgaccatctgccggacaccatctgccgctaaccatctgccgactaccatctgccgtgcaccatctgccggtaaccatctgccgggcgcgccatgcttcatcagactct

SEQ ID NO: 5187 - DNA, 180 bp, Artificial Sequence; identical to SEQ ID NO: 5186
  Synthetic polynucleotide

SEQ ID NO: 5188 - DNA, 191 bp, Artificial Sequence
  Synthetic polynucleotide
atcatctcaccttgcctcctgcaagtatcactcacgcacctgcaggaatccctttgatctatcagaaatccctttgatctatctcgaatccctttgatctatcgacaatccctttgatctatcctaaatccctttgatctatcactaatccctttgatctatctgcggcgcgccatgcttcatcagactct

SEQ ID NO: 5189 - DNA, 191 bp, Artificial Sequence; identical to SEQ ID NO: 5188
  Synthetic polynucleotide

SEQ ID NO: 5190 - DNA, 132 bp, Artificial Sequence
  Synthetic polynucleotide
atcatctcaccttgcctcctgaagcctgtggttgaccacctgcaggggataagaggatatcgggatagacggatactaggataactggatatgcggatagtaggataggcgcgccatgcttcatcagactct

SEQ ID NO: 5191 - DNA, 132 bp, Artificial Sequence; identical to SEQ ID NO: 5190
  Synthetic polynucleotide

SEQ ID NO: 5192 - DNA, 172 bp, Artificial Sequence
  Synthetic polynucleotide
atcatctcaccttgcctcctggatacaggttgttgagccctgcagggttaattagaagagttaattagatcggttaattagagacgttaattagactagttaattagaactgttaattagatgcgttaattagagtagttaattagaggcgcgccatgcttcatcagactct

SEQ ID NO: 5193 - DNA, 172 bp, Artificial Sequence; identical to SEQ ID NO: 5192
  Synthetic polynucleotide

SEQ ID NO: 5194 - DNA, 164 bp, Artificial Sequence
  Synthetic polynucleotide
atcatctcaccttgcctcctggcattcggccttagcagcctgcaggtgacctttgagatgacctttgtcgtgacctttggactgacctttgctatgacctttgacttgacctttgtgctgacctttggtatgacctttgggcgcgccatgcttcatcagactct

SEQ ID NO: 5195 - DNA, 164 bp, Artificial Sequence; identical to SEQ ID NO: 5194
  Synthetic polynucleotide

SEQ ID NO: 5196 - DNA, 185 bp, Artificial Sequence
  Synthetic polynucleotide
atcatctcaccttgcctcctgcactgtcgtattctgtacctgcaggcgttgccatggcaacgagacgttgccatggcaacgtcgcgttgccatggcaacggaccgttgccatggcaacgctacgttgccatggcaacgactcgttgccatggcaacgtgcggcgcgccatgcttcatcagactct

SEQ ID NO: 5197 - DNA, 185 bp, Artificial Sequence; identical to SEQ ID NO: 5196
  Synthetic polynucleotide

SEQ ID NO: 5198 - DNA, 186 bp, Artificial Sequence
  Synthetic polynucleotide
atcatctcaccttgcctcctgaatgaacagcgagacaccctgcaggaatggaaaattattttccctagaaatggaaaattattttcccttcgaatggaaaattattttccctgacaatggaaaattattttccctctaaatggaaaattattttccctactggcgcgccatgcttcatcagactct

SEQ ID NO: 5199 - DNA, 186 bp, Artificial Sequence; identical to SEQ ID NO: 5198
  Synthetic polynucleotide

SEQ ID NO: 5200 - DNA, 172 bp, Artificial Sequence
  Synthetic polynucleotide
atcatctcaccttgcctcctggggcgtctttaacctcacctgcagggttaattagcagagttaattagctcggttaattagcgacgttaattagcctagttaattagcactgttaattagctgcgttaattagcgtagttaattagcggcgcgccatgcttcatcagactct

SEQ ID NO: 5201 - DNA, 172 bp, Artificial Sequence; identical to SEQ ID NO: 5200
  Synthetic polynucleotide

SEQ ID NO: 5202 - DNA, 185 bp, Artificial Sequence
  Synthetic polynucleotide
atcatctcaccttgcctcctgctatttgttccgtcctacctgcaggatacgcccacgcatttagaatacgcccacgcattttcgatacgcccacgcatttgacatacgcccacgcatttctaatacgcccacgcatttactatacgcccacgcattttgcggcgcgccatgcttcatcagactct

SEQ ID NO: 5203 - DNA, 185 bp, Artificial Sequence; identical to SEQ ID NO: 5202
  Synthetic polynucleotide

SEQ ID NO: 5204 - DNA, 196 bp, Artificial Sequence
  Synthetic polynucleotide
atcatctcaccttgcctcctggtcggaagatcaagaaccctgcaggtgacctttggcctagatgacctttggccttcgtgacctttggcctgactgacctttggcctctatgacctttggcctacttgacctttggccttgctgacctttggcctgtatgacctttggcctggcgcgccatgcttcatcagactct

SEQ ID NO: 5205 - DNA, 196 bp, Artificial Sequence; identical to SEQ ID NO: 5204
  Synthetic polynucleotide

SEQ ID NO: 5206 - DNA, 164 bp, Artificial Sequence
  Synthetic polynucleotide
atcatctcaccttgcctcctgtcgtatccaaggctgcgcctgcaggggataatccagaggataatcctcgggataatccgacggataatccctaggataatccactggataatcctgcggataatccgtaggataatccggcgcgccatgcttcatcagactct

SEQ ID NO: 5207 - DNA, 164 bp, Artificial Sequence; identical to SEQ ID NO: 5206
  Synthetic polynucleotide

SEQ ID NO: 5208 - DNA, 164 bp, Artificial Sequence
  Synthetic polynucleotide
atcatctcaccttgcctcctggggtccgcaagtacttccctgcagggagatagggagagagatagggtcggagataggggacgagatagggctagagatagggactgagatagggtgcgagataggggtagagatagggggcgcgccatgcttcatcagactct

SEQ ID NO: 5209 - DNA, 164 bp, Artificial Sequence; identical to SEQ ID NO: 5208
  Synthetic polynucleotide

SEQ ID NO: 5210 - DNA, 164 bp, Artificial Sequence
  Synthetic polynucleotide
atcatctcaccttgcctcctgagaaaccagtatttgtgcctgcaggtgtggcctaagatgtggcctatcgtgtggcctagactgtggcctactatgtggcctaacttgtggcctatgctgtggcctagtatgtggcctaggcgcgccatgcttcatcagactct

SEQ ID NO: 5211 - DNA, 164 bp, Artificial Sequence; identical to SEQ ID NO: 5210
  Synthetic polynucleotide

SEQ ID NO: 5212 - DNA, 156 bp, Artificial Sequence
  Synthetic polynucleotide
atcatctcaccttgcctcctgtcaccgaacacgcaactcctgcaggtttattaaagatttattaatcgtttattaagactttattaactatttattaaacttttattaatgctttattaagtatttattaaggcgcgccatgcttcatcagactct

SEQ ID NO: 5213 - DNA, 156 bp, Artificial Sequence; identical to SEQ ID NO: 5212
  Synthetic polynucleotide

SEQ ID NO: 5214 - DNA, 185 bp, Artificial Sequence
  Synthetic polynucleotide
atcatctcaccttgcctcctgcaataaatgttcaggcgcctgcagggaagtaattaattactagagaagtaattaattacttcggaagtaattaattactgacgaagtaattaattactctagaagtaattaattactactgaagtaattaattacttgcggcgcgccatgcttcatcagactct

SEQ ID NO: 5215 - DNA, 185 bp, Artificial Sequence; identical to SEQ ID NO: 5214
  Synthetic polynucleotide

SEQ ID NO: 5216 - DNA, 185 bp, Artificial Sequence
  Synthetic polynucleotide
atcatctcaccttgcctcctgtcccgaattcgagagtgcctgcagggcctgaactggccagaagagcctgaactggccagatcggcctgaactggccagagacgcctgaactggccagactagcctgaactggccagaactgcctgaactggccagatgcggcgcgccatgcttcatcagactct

SEQ ID NO: 5217 - DNA, 185 bp, Artificial Sequence; identical to SEQ ID NO: 5216
  Synthetic polynucleotide

SEQ ID NO: 5218 - DNA, 185 bp, Artificial Sequence
  Synthetic polynucleotide
atcatctcaccttgcctcctgcgagtggcaaggagtctcctgcaggacgactaattaggagtagaacgactaattaggagttcgacgactaattaggagtgacacgactaattaggagtctaacgactaattaggagtactacgactaattaggagttgcggcgcgccatgcttcatcagactct

SEQ ID NO: 5219 - DNA, 185 bp, Artificial Sequence; identical to SEQ ID NO: 5218
  Synthetic polynucleotide

SEQ ID NO: 5220 - DNA, 185 bp, Artificial Sequence
  Synthetic polynucleotide
atcatctcaccttgcctcctgagcctccatccttaccccctgcaggcgttgccatggcaaccagacgttgccatggcaacctcgcgttgccatggcaaccgaccgttgccatggcaaccctacgttgccatggcaaccactcgttgccatggcaacctgcggcgcgccatgcttcatcagactct

SEQ ID NO: 5221 - DNA, 185 bp, Artificial Sequence; identical to SEQ ID NO: 5220
  Synthetic polynucleotide

SEQ ID NO: 5222 - DNA, 188 bp, Artificial Sequence
  Synthetic polynucleotide
atcatctcaccttgcctcctgatactatgggacgtatccctgcagggcccatatatggagagcccatatatggtcggcccatatatgggacgcccatatatggctagcccatatatggactgcccatatatggtgcgcccatatatgggtagcccatatatggggcgcgccatgcttcatcagactct

SEQ ID NO: 5223 - DNA, 188 bp, Artificial Sequence; identical to SEQ ID NO: 5222
  Synthetic polynucleotide

SEQ ID NO: 5224 - DNA, 156 bp, Artificial Sequence
  Synthetic polynucleotide
atcatctcaccttgcctcctgcattgatatttggaacgcctgcaggtgacgtggagatgacgtggtcgtgacgtgggactgacgtggctatgacgtggacttgacgtggtgctgacgtgggtatgacgtggggcgcgccatgcttcatcagactct

SEQ ID NO: 5225 - DNA, 156 bp, Artificial Sequence; identical to SEQ ID NO: 5224
  Synthetic polynucleotide

SEQ ID NO: 5226 - DNA, 164 bp, Artificial Sequence
  Synthetic polynucleotide
atcatctcaccttgcctcctggagacatccgtgaaatgcctgcaggattgttttgagaattgttttgtcgattgttttggacattgttttgctaattgttttgactattgttttgtgcattgttttggtaattgttttgggcgcgccatgcttcatcagactct

SEQ ID NO: 5227 - DNA, 164 bp, Artificial Sequence; identical to SEQ ID NO: 5226
  Synthetic polynucleotide

SEQ ID NO: 5228 - DNA, 180 bp, Artificial Sequence
  Synthetic polynucleotide
atcatctcaccttgcctcctgtctgatccgtcagcggacctgcaggcatgcgggtacagacatgcgggtactcgcatgcgggtacgaccatgcgggtacctacatgcgggtacactcatgcgggtactgccatgcgggtacgtacatgcgggtacggcgcgccatgcttcatcagactct

SEQ ID NO: 5229 - DNA, 180 bp, Artificial Sequence; identical to SEQ ID NO: 5228
  Synthetic polynucleotide

SEQ ID NO: 5230 - DNA, 164 bp, Artificial Sequence
  Synthetic polynucleotide
atcatctcaccttgcctcctgaagggctctgtgtctgacctgcaggaacatatggagaaacatatggtcgaacatatgggacaacatatggctaaacatatggactaacatatggtgcaacatatgggtaaacatatggggcgcgccatgcttcatcagactct

SEQ ID NO: 5231 - DNA, 164 bp, Artificial Sequence; identical to SEQ ID NO: 5230
  Synthetic polynucleotide

SEQ ID NO: 5232 - DNA, 172 bp, Artificial Sequence
  Synthetic polynucleotide
atcatctcaccttgcctcctgtagcgcatgggtgctcacctgcaggtgttatctgcagatgttatctgctcgtgttatctgcgactgttatctgcctatgttatctgcacttgttatctgctgctgttatctgcgtatgttatctgcggcgcgccatgcttcatcagactct

SEQ ID NO: 5233 - DNA, 172 bp, Artificial Sequence; identical to SEQ ID NO: 5232
  Synthetic polynucleotide

SEQ ID NO: 5234 - DNA, 191 bp, Artificial Sequence
  Synthetic polynucleotide
atcatctcaccttgcctcctgctagatcgttagctgtccctgcaggtaaatacatgtaaaattagataaatacatgtaaaatttcgtaaatacatgtaaaattgactaaatacatgtaaaattctataaatacatgtaaaattacttaaatacatgtaaaatttgcggcgcgccatgcttcatcagactct

SEQ ID NO: 5235 - DNA, 191 bp, Artificial Sequence; identical to SEQ ID NO: 5234
  Synthetic polynucleotide

SEQ ID NO: 5236 - DNA, 180 bp, Artificial Sequence
  Synthetic polynucleotide
atcatctcaccttgcctcctgtatcagttccgcgaacccctgcaggcaaaggtcagaagacaaaggtcagatcgcaaaggtcagagaccaaaggtcagactacaaaggtcagaactcaaaggtcagatgccaaaggtcagagtacaaaggtcagaggcgcgccatgcttcatcagactct

SEQ ID NO: 5237 - DNA, 180 bp, Artificial Sequence; identical to SEQ ID NO: 5236
  Synthetic polynucleotide

SEQ ID NO: 5238 - DNA, 164 bp, Artificial Sequence
  Synthetic polynucleotide
atcatctcaccttgcctcctgtacgaattagcgagtctcctgcaggattgttttcagaattgttttctcgattgttttcgacattgttttcctaattgttttcactattgttttctgcattgttttcgtaattgttttcggcgcgccatgcttcatcagactct

SEQ ID NO: 5239 - DNA, 164 bp, Artificial Sequence; identical to SEQ ID NO: 5238
  Synthetic polynucleotide

SEQ ID NO: 5240 - DNA, 200 bp, Artificial Sequence
  Synthetic polynucleotide
atcatctcaccttgcctcctgagaaattccagtgccatcctgcagggaacccattgttcttttccagagaacccattgttcttttcctcggaacccattgttcttttccgacgaacccattgttcttttccctagaacccattgttcttttccactgaacccattgttcttttccggcgcgccatgcttcatcagactct

SEQ ID NO: 5241 - DNA, 200 bp, Artificial Sequence; identical to SEQ ID NO: 5240
  Synthetic polynucleotide

SEQ ID NO: 5242 - DNA, 197 bp, Artificial Sequence
  Synthetic polynucleotide
atcatctcaccttgcctcctggccttaacgaaggtttccctgcaggataaaggcgcgcgatagaataaaggcgcgcgattcgataaaggcgcgcgatgacataaaggcgcgcgatctaataaaggcgcgcgatactataaaggcgcgcgattgcataaaggcgcgcgatgtaggcgcgccatgcttcatcagactct

SEQ ID NO: 5243 - DNA, 197 bp, Artificial Sequence; identical to SEQ ID NO: 5242
  Synthetic polynucleotide

SEQ ID NO: 5244 - DNA, 191 bp, Artificial Sequence
  Synthetic polynucleotide
atcatctcaccttgcctcctgagagcactcagagcagtcctgcaggtgattattgatgggtgaagatgattattgatgggtgatcgtgattattgatgggtgagactgattattgatgggtgactatgattattgatgggtgaacttgattattgatgggtgatgcggcgcgccatgcttcatcagactct

SEQ ID NO: 5245 - DNA, 191 bp, Artificial Sequence; identical to SEQ ID NO: 5244
  Synthetic polynucleotide

SEQ ID NO: 5246 - DNA, 195 bp, Artificial Sequence
  Synthetic polynucleotide
atcatctcaccttgcctcctgtgatttcttaaaggacgcctgcaggggggcggctacgcatcattgcgcctcgaagaggggcggctacgcatcattgcgcctcgatcgggggcggctacgcatcattgcgcctcgagacggggcggctacgcatcattgcgcctcgactaggcgcgccatgcttcatcagactct

SEQ ID NO: 5247 - DNA, 195 bp, Artificial Sequence; identical to SEQ ID NO: 5246
  Synthetic polynucleotide

SEQ ID NO: 5248 - DNA, 164 bp, Artificial Sequence
  Synthetic polynucleotide
atcatctcaccttgcctcctgcctaaacggaccgggtacctgcaggattgcgtaaagaattgcgtaatcgattgcgtaagacattgcgtaactaattgcgtaaactattgcgtaatgcattgcgtaagtaattgcgtaaggcgcgccatgcttcatcagactct

SEQ ID NO: 5249 - DNA, 164 bp, Artificial Sequence; identical to SEQ ID NO: 5248
  Synthetic polynucleotide

SEQ ID NO: 5250 - DNA, 190 bp, Artificial Sequence
  Synthetic polynucleotide
atcatctcaccttgcctcctggcttgcctgtggtcagtcctgcaggcattgtaatgcaaaagacattgtaatgcaaatcgcattgtaatgcaaagaccattgtaatgcaaactacattgtaatgcaaaactcattgtaatgcaaatgccattgtaatgcaaagtaggcgcgccatgcttcatcagactct

SEQ ID NO: 5251 - DNA, 190 bp, Artificial Sequence; identical to SEQ ID NO: 5250
  Synthetic polynucleotide

SEQ ID NO: 5252 - DNA, 164 bp, Artificial Sequence
  Synthetic polynucleotide
atcatctcaccttgcctcctgttgattctcttcgcacgcctgcaggattgttttaagaattgttttatcgattgttttagacattgttttactaattgttttaactattgttttatgcattgttttagtaattgttttaggcgcgccatgcttcatcagactct

SEQ ID NO: 5253 - DNA, 164 bp, Artificial Sequence; identical to SEQ ID NO: 5252
  Synthetic polynucleotide

SEQ ID NO: 5254 - DNA, 188 bp, Artificial Sequence
  Synthetic polynucleotide
atcatctcaccttgcctcctgcacatcgaaagtcgagacctgcaggatgaatatgcaaagaatgaatatgcaatcgatgaatatgcaagacatgaatatgcaactaatgaatatgcaaactatgaatatgcaatgcatgaatatgcaagtaatgaatatgcaaggcgcgccatgcttcatcagactct

SEQ ID NO: 5255 - DNA, 188 bp, Artificial Sequence; identical to SEQ ID NO: 5254
  Synthetic polynucleotide

SEQ ID NO: 5256 - DNA, 172 bp, Artificial Sequence
  Synthetic polynucleotide
atcatctcaccttgcctcctgcagcaatacaaccaagacctgcaggcgccatgtttagacgccatgttttcgcgccatgtttgaccgccatgtttctacgccatgtttactcgccatgttttgccgccatgtttgtacgccatgtttggcgcgccatgcttcatcagactct

SEQ ID NO: 5257 - DNA, 172 bp, Artificial Sequence; identical to SEQ ID NO: 5256
  Synthetic polynucleotide

SEQ ID NO: 5258 - DNA, 180 bp, Artificial Sequence
  Synthetic polynucleotide
atcatctcaccttgcctcctgggcgacgaaactggatacctgcaggagcaattaaaaagaagcaattaaaatcgagcaattaaaagacagcaattaaaactaagcaattaaaaactagcaattaaaatgcagcaattaaaagtaagcaattaaaaggcgcgccatgcttcatcagactct

SEQ ID NO: 5259 - DNA, 180 bp, Artificial Sequence; identical to SEQ ID NO: 5258
  Synthetic polynucleotide

SEQ ID NO: 5260 - DNA, 191 bp, Artificial Sequence
  Synthetic polynucleotide
atcatctcaccttgcctcctgtgttacggatgatcgcccctgcaggcgaagtaattaattttcagacgaagtaattaattttctcgcgaagtaattaattttcgaccgaagtaattaattttcctacgaagtaattaattttcactcgaagtaattaattttctgcggcgcgccatgcttcatcagactct

SEQ ID NO: 5261 - DNA, 191 bp, Artificial Sequence; identical to SEQ ID NO: 5260
  Synthetic polynucleotide

SEQ ID NO: 5262 - DNA, 197 bp, Artificial Sequence
  Synthetic polynucleotide
atcatctcaccttgcctcctggccgcacttccagtatccctgcaggtgtccgtggtgctgaagatgtccgtggtgctgatcgtgtccgtggtgctgagactgtccgtggtgctgactatgtccgtggtgctgaacttgtccgtggtgctgatgctgtccgtggtgctgagtaggcgcgccatgcttcatcagactct

SEQ ID NO: 5263 - DNA, 197 bp, Artificial Sequence; identical to SEQ ID NO: 5262
  Synthetic polynucleotide

SEQ ID NO: 5264 - DNA, 185 bp, Artificial Sequence
  Synthetic polynucleotide
atcatctcaccttgcctcctggacttcaagatagttctcctgcaggggtgtgatatcacaccagaggtgtgatatcacacctcgggtgtgatatcacaccgacggtgtgatatcacaccctaggtgtgatatcacaccactggtgtgatatcacacctgcggcgcgccatgcttcatcagactct

SEQ ID NO: 5265 - DNA, 185 bp, Artificial Sequence; identical to SEQ ID NO: 5264
  Synthetic polynucleotide

SEQ ID NO: 5266 - DNA, 164 bp, Artificial Sequence
  Synthetic polynucleotide
atcatctcaccttgcctcctgatttaccgtgtgttctccctgcagggccaattaaagagccaattaatcggccaattaagacgccaattaactagccaattaaactgccaattaatgcgccaattaagtagccaattaaggcgcgccatgcttcatcagactct

SEQ ID NO: 5267 - DNA, 164 bp, Artificial Sequence; identical to SEQ ID NO: 5266
  Synthetic polynucleotide

SEQ ID NO: 5268 - DNA, 172 bp, Artificial Sequence
  Synthetic polynucleotide
atcatctcaccttgcctcctgtgtattgcgtgaccgtgcctgcagggttaattagtagagttaattagttcggttaattagtgacgttaattagtctagttaattagtactgttaattagttgcgttaattagtgtagttaattagtggcgcgccatgcttcatcagactct

SEQ ID NO: 5269 - DNA, 172 bp, Artificial Sequence; identical to SEQ ID NO: 5268
  Synthetic polynucleotide

SEQ ID NO: 5270 - DNA, 191 bp, Artificial Sequence
  Synthetic polynucleotide
atcatctcaccttgcctcctgacccagaatgtctggctcctgcagggggaacattatgtacccagagggaacattatgtaccctcggggaacattatgtacccgacgggaacattatgtacccctagggaacattatgtacccactgggaacattatgtaccctgcggcgcgccatgcttcatcagactct

SEQ ID NO: 5271 - DNA, 191 bp, Artificial Sequence; identical to SEQ ID NO: 5270
  Synthetic polynucleotide

SEQ ID NO: 5272 - DNA, 188 bp, Artificial Sequence
  Synthetic polynucleotide
atcatctcaccttgcctcctgtattaggtgatacgacgcctgcagggtccctggggacagagtccctggggactcggtccctggggacgacgtccctggggacctagtccctggggacactgtccctggggactgcgtccctggggacgtagtccctggggacggcgcgccatgcttcatcagactct

SEQ ID NO: 5273 - DNA, 188 bp, Artificial Sequence; identical to SEQ ID NO: 5272
  Synthetic polynucleotide

SEQ ID NO: 5274 - DNA, 197 bp, Artificial Sequence
  Synthetic polynucleotide
atcatctcaccttgcctcctgatacgatagcgtcattacctgcaggaccagccaatcagagagaaccagccaatcagagtcgaccagccaatcagaggacaccagccaatcagagctaaccagccaatcagagactaccagccaatcagagtgcaccagccaatcagaggtaggcgcgccatgcttcatcagactct

SEQ ID NO: 5275 - DNA, 197 bp, Artificial Sequence; identical to SEQ ID NO: 5274
  Synthetic polynucleotide

SEQ ID NO: 5276 - DNA, 172 bp, Artificial Sequence
  Synthetic polynucleotide
atcatctcaccttgcctcctgctatcgaaagaggttcgcctgcagggggcgttgccagagggcgttgcctcggggcgttgccgacgggcgttgccctagggcgttgccactgggcgttgcctgcgggcgttgccgtagggcgttgccggcgcgccatgcttcatcagactct

SEQ ID NO: 5277 - DNA, 172 bp, Artificial Sequence; identical to SEQ ID NO: 5276
  Synthetic polynucleotide

SEQ ID NO: 5278 - DNA, 172 bp, Artificial Sequence
  Synthetic polynucleotide
atcatctcaccttgcctcctgcctctggctcaacccatcctgcagggcagataaggagagcagataaggtcggcagataagggacgcagataaggctagcagataaggactgcagataaggtgcgcagataagggtagcagataaggggcgcgccatgcttcatcagactct

SEQ ID NO: 5279 - DNA, 172 bp, Artificial Sequence; identical to SEQ ID NO: 5278
  Synthetic polynucleotide

SEQ ID NO: 5280 - DNA, 156 bp, Artificial Sequence
  Synthetic polynucleotide
atcatctcaccttgcctcctggcggaagactttcaaaccctgcagggcgcctttagagcgccttttcggcgcctttgacgcgcctttctagcgcctttactgcgccttttgcgcgcctttgtagcgcctttggcgcgccatgcttcatcagactct

SEQ ID NO: 5281 - DNA, 156 bp, Artificial Sequence; identical to SEQ ID NO: 5280
  Synthetic polynucleotide

SEQ ID NO: 5282 - DNA, 197 bp, Artificial Sequence
  Synthetic polynucleotide
atcatctcaccttgcctcctggtagtaaagcccttatacctgcaggcgttgctaggcaaccagacgttgctaggcaacctcgcgttgctaggcaaccgaccgttgctaggcaaccctacgttgctaggcaaccactcgttgctaggcaacctgccgttgctaggcaaccgtaggcgcgccatgcttcatcagactct

SEQ ID NO: 5283 - DNA, 197 bp, Artificial Sequence; identical to SEQ ID NO: 5282
  Synthetic polynucleotide

SEQ ID NO: 5284 - DNA, 197 bp, Artificial Sequence
  Synthetic polynucleotide
atcatctcaccttgcctcctgaacccaccgtagtggtacctgcaggtcactttcactttctagatcactttcactttcttcgtcactttcactttctgactcactttcactttctctatcactttcactttctacttcactttcactttcttgctcactttcactttctgtaggcgcgccatgcttcatcagactct

SEQ ID NO: 5285 - DNA, 197 bp, Artificial Sequence; identical to SEQ ID NO: 5284
  Synthetic polynucleotide

SEQ ID NO: 5286 - DNA, 185 bp, Artificial Sequence
  Synthetic polynucleotide
atcatctcaccttgcctcctgattccgatttgagccgacctgcaggaatttcaagtggcttaagaaatttcaagtggcttatcgaatttcaagtggcttagacaatttcaagtggcttactaaatttcaagtggcttaactaatttcaagtggcttatgcggcgcgccatgcttcatcagactct

SEQ ID NO: 5287 - DNA, 185 bp, Artificial Sequence; identical to SEQ ID NO: 5286
  Synthetic polynucleotide

SEQ ID NO: 5288 - DNA, 156 bp, Artificial Sequence
  Synthetic polynucleotide
atcatctcaccttgcctcctgcgtcttctgctcacatccctgcaggacgtaataagaacgtaatatcgacgtaatagacacgtaatactaacgtaataactacgtaatatgcacgtaatagtaacgtaataggcgcgccatgcttcatcagactct

SEQ ID NO: 5289 - DNA, 156 bp, Artificial Sequence; identical to SEQ ID NO: 5288
  Synthetic polynucleotide

SEQ ID NO: 5290 - DNA, 196 bp, Artificial Sequence
  Synthetic polynucleotide
atcatctcaccttgcctcctgaggtagagttagagatccctgcaggtttttgaaatgagagatttttgaaatgagtcgtttttgaaatgaggactttttgaaatgagctatttttgaaatgagacttttttgaaatgagtgctttttgaaatgaggtatttttgaaatgagggcgcgccatgcttcatcagactct

SEQ ID NO: 5291 - DNA, 196 bp, Artificial Sequence; identical to SEQ ID NO: 5290
  Synthetic polynucleotide

SEQ ID NO: 5292 - DNA, 196 bp, Artificial Sequence
  Synthetic polynucleotide
atcatctcaccttgcctcctgcttcaagggttgtggcgcctgcaggggccgtgatttcgagaggccgtgatttcgtcgggccgtgatttcggacggccgtgatttcgctaggccgtgatttcgactggccgtgatttcgtgcggccgtgatttcggtaggccgtgatttcgggcgcgccatgcttcatcagactct

SEQ ID NO: 5293 - DNA, 196 bp, Artificial Sequence; identical to SEQ ID NO: 5292
  Synthetic polynucleotide

SEQ ID NO: 5294 - DNA, 185 bp, Artificial Sequence
  Synthetic polynucleotide
atcatctcaccttgcctcctgggctttcgccaccataacctgcaggattcactaattactttagaattcactaattacttttcgattcactaattactttgacattcactaattactttctaattcactaattactttactattcactaattacttttgcggcgcgccatgcttcatcagactct

SEQ ID NO: 5295 - DNA, 185 bp, Artificial Sequence; identical to SEQ ID NO: 5294
  Synthetic polynucleotide

SEQ ID NO: 5296 - DNA, 180 bp, Artificial Sequence
  Synthetic polynucleotide
atcatctcaccttgcctcctggacgactggttggtgagcctgcaggtccacttaactagatccacttaacttcgtccacttaactgactccacttaactctatccacttaactacttccacttaacttgctccacttaactgtatccacttaactggcgcgccatgcttcatcagactct

SEQ ID NO: 5297 - DNA, 180 bp, Artificial Sequence; identical to SEQ ID NO: 5296
  Synthetic polynucleotide

SEQ ID NO: 5298 - DNA, 191 bp, Artificial Sequence
  Synthetic polynucleotide
atcatctcaccttgcctcctggtttagtcttggctgcgcctgcagggataattaattactttgagagataattaattactttgtcggataattaattactttggacgataattaattactttgctagataattaattactttgactgataattaattactttgtgcggcgcgccatgcttcatcagactct

SEQ ID NO: 5299 - DNA, 191 bp, Artificial Sequence; identical to SEQ ID NO: 5298
  Synthetic polynucleotide

SEQ ID NO: 5300 - DNA, 197 bp, Artificial Sequence
  Synthetic polynucleotide
atcatctcaccttgcctcctgtctcctgttctcacccacctgcaggcgttgctaggcaacgagacgttgctaggcaacgtcgcgttgctaggcaacggaccgttgctaggcaacgctacgttgctaggcaacgactcgttgctaggcaacgtgccgttgctaggcaacggtaggcgcgccatgcttcatcagactct

SEQ ID NO: 5301 - DNA, 197 bp, Artificial Sequence; identical to SEQ ID NO: 5300
  Synthetic polynucleotide

SEQ ID NO: 5302 - DNA, 190 bp, Artificial Sequence
  Synthetic polynucleotide
atcatctcaccttgcctcctgaggcacttgacccagaccctgcaggtgtaaatattgacaagatgtaaatattgacatcgtgtaaatattgacagactgtaaatattgacactatgtaaatattgacaacttgtaaatattgacatgctgtaaatattgacagtaggcgcgccatgcttcatcagactct

SEQ ID NO: 5303 - DNA, 190 bp, Artificial Sequence; identical to SEQ ID NO: 5302
  Synthetic polynucleotide

SEQ ID NO: 5304 - DNA, 191 bp, Artificial Sequence
  Synthetic polynucleotide
atcatctcaccttgcctcctgacgacaaagagtagtttcctgcagggtcacgtcaccgccgcgcgccagagtcacgtcaccgccgcgcgcctcggtcacgtcaccgccgcgcgccgacgtcacgtcaccgccgcgcgccctagtcacgtcaccgccgcgcgccactggcgcgccatgcttcatcagactct

SEQ ID NO: 5305 - DNA, 191 bp, Artificial Sequence; identical to SEQ ID NO: 5304
  Synthetic polynucleotide

SEQ ID NO: 5306 - DNA, 180 bp, Artificial Sequence
  Synthetic polynucleotide
atcatctcaccttgcctcctgcctcttggatgcctgttcctgcaggagaacaatgggagaagaacaatgggtcgagaacaatggggacagaacaatgggctaagaacaatgggactagaacaatgggtgcagaacaatggggtaagaacaatgggggcgcgccatgcttcatcagactct

SEQ ID NO: 5307 - DNA, 180 bp, Artificial Sequence; identical to SEQ ID NO: 5306
  Synthetic polynucleotide

SEQ ID NO: 5308 - DNA, 191 bp, Artificial Sequence
  Synthetic polynucleotide
atcatctcaccttgcctcctgggcagggctgagaattgcctgcaggattctttaattgcttgtagaattctttaattgcttgttcgattctttaattgcttgtgacattctttaattgcttgtctaattctttaattgcttgtactattctttaattgcttgttgcggcgcgccatgcttcatcagactct

SEQ ID NO: 5309 - DNA, 191 bp, Artificial Sequence; identical to SEQ ID NO: 5308
  Synthetic polynucleotide

SEQ ID NO: 5310 - DNA, 190 bp, Artificial Sequence
  Synthetic polynucleotide
atcatctcaccttgcctcctgatcagcaagatgctagtcctgcaggatcaaaggagccgaagaatcaaaggagccgatcgatcaaaggagccgagacatcaaaggagccgactaatcaaaggagccgaactatcaaaggagccgatgcatcaaaggagccgagtaggcgcgccatgcttcatcagactct

SEQ ID NO: 5311 - DNA, 190 bp, Artificial Sequence; identical to SEQ ID NO: 5310
  Synthetic polynucleotide

SEQ ID NO: 5312 - DNA, 197 bp, Artificial Sequence
  Synthetic polynucleotide
atcatctcaccttgcctcctggccacaaacacatcttccctgcagggaaggaagcggaagaagagaaggaagcggaagatcggaaggaagcggaagagacgaaggaagcggaagactagaaggaagcggaagaactgaaggaagcggaagatgcgaaggaagcggaagagtaggcgcgccatgcttcatcagactct

SEQ ID NO: 5313 - DNA, 197 bp, Artificial Sequence; identical to SEQ ID NO: 5312
  Synthetic polynucleotide

SEQ ID NO: 5314 - DNA, 164 bp, Artificial Sequence
  Synthetic polynucleotide
atcatctcaccttgcctcctggtgtgtcataccttatccctgcaggccattgttcagaccattgttctcgccattgttcgacccattgttcctaccattgttcactccattgttctgcccattgttcgtaccattgttcggcgcgccatgcttcatcagactct

SEQ ID NO: 5315 - DNA, 164 bp, Artificial Sequence; identical to SEQ ID NO: 5314
  Synthetic polynucleotide

SEQ ID NO: 5316 - DNA, 172 bp, Artificial Sequence
  Synthetic polynucleotide
atcatctcaccttgcctcctgaacagcgctccttaaagcctgcaggtttgacttttagatttgactttttcgtttgacttttgactttgacttttctatttgacttttacttttgactttttgctttgacttttgtatttgacttttggcgcgccatgcttcatcagactct

SEQ ID NO: 5317 - DNA, 172 bp, Artificial Sequence; identical to SEQ ID NO: 5316
  Synthetic polynucleotide

SEQ ID NO: 5318 - DNA, 148 bp, Artificial Sequence
  Synthetic polynucleotide
atcatctcaccttgcctcctggggtggttgagtaagaacctgcaggtgactcaagatgactcatcgtgactcagactgactcactatgactcaacttgactcatgctgactcagtatgactcaggcgcgccatgcttcatcagactct

SEQ ID NO: 5319 - DNA, 148 bp, Artificial Sequence; identical to SEQ ID NO: 5318
  Synthetic polynucleotide

SEQ ID NO: 5320 - DNA, 196 bp, Artificial Sequence
  Synthetic polynucleotide
atcatctcaccttgcctcctgcggtcgccttcataatgcctgcaggaaattgttacattagaaaattgttacatttcgaaattgttacattgacaaattgttacattctaaaattgttacattactaaattgttacatttgcaaattgttacattgtaaaattgttacattggcgcgccatgcttcatcagactct

SEQ ID NO: 5321 - DNA, 196 bp, Artificial Sequence; identical to SEQ ID NO: 5320
  Synthetic polynucleotide

SEQ ID NO: 5322 - DNA, 197 bp, Artificial Sequence
  Synthetic polynucleotide
atcatctcaccttgcctcctgttaggagcctgtgtgtccctgcaggccatcaatcaatttaagaccatcaatcaatttatcgccatcaatcaatttagacccatcaatcaatttactaccatcaatcaatttaactccatcaatcaatttatgcccatcaatcaatttagtaggcgcgccatgcttcatcagactct

SEQ ID NO: 5323 - DNA, 197 bp, Artificial Sequence; identical to SEQ ID NO: 5322
  Synthetic polynucleotide

SEQ ID NO: 5324 - DNA, 190 bp, Artificial Sequence
  Synthetic polynucleotide
atcatctcaccttgcctcctgggccttgtgagaatagacctgcaggtccagatgtttcgcagatccagatgtttcgctcgtccagatgtttcgcgactccagatgtttcgcctatccagatgtttcgcacttccagatgtttcgctgctccagatgtttcgcgtaggcgcgccatgcttcatcagactct

SEQ ID NO: 5325 - DNA, 190 bp, Artificial Sequence; identical to SEQ ID NO: 5324
  Synthetic polynucleotide

SEQ ID NO: 5326 - DNA, 196 bp, Artificial Sequence
  Synthetic polynucleotide
atcatctcaccttgcctcctggccgcatttgggttcaacctgcaggcaagatggcggccagacaagatggcggcctcgcaagatggcggccgaccaagatggcggccctacaagatggcggccactcaagatggcggcctgccaagatggcggccgtacaagatggcggccggcgcgccatgcttcatcagactct

SEQ ID NO: 5327 - DNA, 196 bp, Artificial Sequence; identical to SEQ ID NO: 5326
  Synthetic polynucleotide

SEQ ID NO: 5328 - DNA, 197 bp, Artificial Sequence
  Synthetic polynucleotide
atcatctcaccttgcctcctgcgatgtgataccgtcagcctgcaggcattgaccttttgacctcagacattgaccttttgacctctcgcattgaccttttgacctcgaccattgaccttttgacctcctacattgaccttttgacctcactcattgaccttttgacctctgcggcgcgccatgcttcatcagactct

SEQ ID NO: 5329 - DNA, 197 bp, Artificial Sequence; identical to SEQ ID NO: 5328
  Synthetic polynucleotide

SEQ ID NO: 5330 - DNA, 188 bp, Artificial Sequence
  Synthetic polynucleotide
atcatctcaccttgcctcctgcctgttgctactcaatccctgcaggggccaaagtccaagaggccaaagtccatcgggccaaagtccagacggccaaagtccactaggccaaagtccaactggccaaagtccatgcggccaaagtccagtaggccaaagtccaggcgcgccatgcttcatcagactct

SEQ ID NO: 5331 - DNA, 188 bp, Artificial Sequence; identical to SEQ ID NO: 5330
  Synthetic polynucleotide

SEQ ID NO: 5332 - DNA, 197 bp, Artificial Sequence
  Synthetic polynucleotide
atcatctcaccttgcctcctgttccgtatgtgtatcatcctgcaggcccgttgcctagcaactgagacccgttgcctagcaactgtcgcccgttgcctagcaactggaccccgttgcctagcaactgctacccgttgcctagcaactgactcccgttgcctagcaactgtgcggcgcgccatgcttcatcagactct

SEQ ID NO: 5333 - DNA, 197 bp, Artificial Sequence; identical to SEQ ID NO: 5332
  Synthetic polynucleotide

SEQ ID NO: 5334 - DNA, 197 bp, Artificial Sequence
  Synthetic polynucleotide
atcatctcaccttgcctcctgttctaagtccgattagccctgcagggatgacatcatctttagagatgacatcatcttttcggatgacatcatctttgacgatgacatcatctttctagatgacatcatctttactgatgacatcatcttttgcgatgacatcatctttgtaggcgcgccatgcttcatcagactct

SEQ ID NO: 5335 - DNA, 197 bp, Artificial Sequence; identical to SEQ ID NO: 5334
  Synthetic polynucleotide

SEQ ID NO: 5336 - DNA, 180 bp, Artificial Sequence
  Synthetic polynucleotide
atcatctcaccttgcctcctgagaagggctcctaggtgcctgcaggaccatggacagagaaccatggacagtcgaccatggacaggacaccatggacagctaaccatggacagactaccatggacagtgcaccatggacaggtaaccatggacagggcgcgccatgcttcatcagactct

SEQ ID NO: 5337 - DNA, 180 bp, Artificial Sequence; identical to SEQ ID NO: 5336
  Synthetic polynucleotide

SEQ ID NO: 5338 - DNA, 156 bp, Artificial Sequence
  Synthetic polynucleotide
atcatctcaccttgcctcctgcctgacacaccgtgttgcctgcaggtcacgcgaagatcacgcgatcgtcacgcgagactcacgcgactatcacgcgaacttcacgcgatgctcacgcgagtatcacgcgaggcgcgccatgcttcatcagactct

SEQ ID NO: 5339 - DNA, 156 bp, Artificial Sequence; identical to SEQ ID NO: 5338
  Synthetic polynucleotide

SEQ ID NO: 5340 - DNA, 191 bp, Artificial Sequence
  Synthetic polynucleotide
atcatctcaccttgcctcctgatatatcatcagagtgccctgcaggggtgattaattaatgggagaggtgattaattaatgggtcgggtgattaattaatggggacggtgattaattaatgggctaggtgattaattaatgggactggtgattaattaatgggtgcggcgcgccatgcttcatcagactct

SEQ ID NO: 5341 - DNA, 191 bp, Artificial Sequence; identical to SEQ ID NO: 5340
  Synthetic polynucleotide

SEQ ID NO: 5342 - DNA, 197 bp, Artificial Sequence
  Synthetic polynucleotide
atcatctcaccttgcctcctgtgctctccgtgtcgagacctgcagggtcgccatggcaaccagagtcgccatggcaacctcggtcgccatggcaaccgacgtcgccatggcaaccctagtcgccatggcaaccactgtcgccatggcaacctgcgtcgccatggcaaccgtaggcgcgccatgcttcatcagactct

SEQ ID NO: 5343 - DNA, 197 bp, Artificial Sequence; identical to SEQ ID NO: 5342
  Synthetic polynucleotide

SEQ ID NO: 5344 - DNA, 180 bp, Artificial Sequence
  Synthetic polynucleotide
atcatctcaccttgcctcctgttgccgacatgctagttcctgcagggaataattaccagagaataattacctcggaataattaccgacgaataattaccctagaataattaccactgaataattacctgcgaataattaccgtagaataattaccggcgcgccatgcttcatcagactct

SEQ ID NO: 5345 - DNA, 180 bp, Artificial Sequence; identical to SEQ ID NO: 5344
  Synthetic polynucleotide

SEQ ID NO: 5346 - DNA, 180 bp, Artificial Sequence
  Synthetic polynucleotide
atcatctcaccttgcctcctggggcaatattagtggtccctgcaggcgcaggtgtgcagacgcaggtgtgctcgcgcaggtgtgcgaccgcaggtgtgcctacgcaggtgtgcactcgcaggtgtgctgccgcaggtgtgcgtacgcaggtgtgcggcgcgccatgcttcatcagactct

SEQ ID NO: 5347 - DNA, 180 bp, Artificial Sequence; identical to SEQ ID NO: 5346
  Synthetic polynucleotide

SEQ ID NO: 5348 - DNA, 197 bp, Artificial Sequence
  Synthetic polynucleotide
atcatctcaccttgcctcctgctggccatgttgtctttcctgcaggccagccacacccaccagaccagccacacccacctcgccagccacacccaccgacccagccacacccaccctaccagccacacccaccactccagccacacccacctgcccagccacacccaccgtaggcgcgccatgcttcatcagactct

SEQ ID NO: 5349 - DNA, 197 bp, Artificial Sequence; identical to SEQ ID NO: 5348
  Synthetic polynucleotide

SEQ ID NO: 5350 - DNA, 164 bp, Artificial Sequence
  Synthetic polynucleotide
atcatctcaccttgcctcctgttattggatggtccacgcctgcaggatgcgtgggagaatgcgtgggtcgatgcgtggggacatgcgtgggctaatgcgtgggactatgcgtgggtgcatgcgtggggtaatgcgtgggggcgcgccatgcttcatcagactct

SEQ ID NO: 5351 - DNA, 164 bp, Artificial Sequence; identical to SEQ ID NO: 5350
  Synthetic polynucleotide

SEQ ID NO: 5352 - DNA, 180 bp, Artificial Sequence
  Synthetic polynucleotide
atcatctcaccttgcctcctgtccaatttcaatagtcgcctgcaggcccacgtgataagacccacgtgatatcgcccacgtgatagaccccacgtgatactacccacgtgataactcccacgtgatatgccccacgtgatagtacccacgtgataggcgcgccatgcttcatcagactct

SEQ ID NO: 5353 - DNA, 180 bp, Artificial Sequence; identical to SEQ ID NO: 5352
  Synthetic polynucleotide

SEQ ID NO: 5354 - DNA, 190 bp, Artificial Sequence
  Synthetic polynucleotide
atcatctcaccttgcctcctgcgaacgtgccttgtaatcctgcaggaggatgatgcaatcagaaggatgatgcaatctcgaggatgatgcaatcgacaggatgatgcaatcctaaggatgatgcaatcactaggatgatgcaatctgcaggatgatgcaatcgtaggcgcgccatgcttcatcagactct

SEQ ID NO: 5355 - DNA, 190 bp, Artificial Sequence; identical to SEQ ID NO: 5354
  Synthetic polynucleotide

SEQ ID NO: 5356 - DNA, 196 bp, Artificial Sequence
  Synthetic polynucleotide
atcatctcaccttgcctcctgagcggctgtttactaatcctgcagggtatgcaaatgagagagtatgcaaatgagtcggtatgcaaatgaggacgtatgcaaatgagctagtatgcaaatgagactgtatgcaaatgagtgcgtatgcaaatgaggtagtatgcaaatgagggcgcgccatgcttcatcagactct

SEQ ID NO: 5357 - DNA, 196 bp, Artificial Sequence; identical to SEQ ID NO: 5356
  Synthetic polynucleotide

SEQ ID NO: 5358 - DNA, 190 bp, Artificial Sequence
  Synthetic polynucleotide
atcatctcaccttgcctcctgtatgtgctggctgactgcctgcagggcgctgacgtaaccagagcgctgacgtaacctcggcgctgacgtaaccgacgcgctgacgtaaccctagcgctgacgtaaccactgcgctgacgtaacctgcgcgctgacgtaaccgtaggcgcgccatgcttcatcagactct

SEQ ID NO: 5359 - DNA, 190 bp, Artificial Sequence; identical to SEQ ID NO: 5358
  Synthetic polynucleotide

SEQ ID NO: 5360 - DNA, 197 bp, Artificial Sequence
  Synthetic polynucleotide
atcatctcaccttgcctcctgtccgtgttccactccgtcctgcaggttggcacggtgccaaagattggcacggtgccaatcgttggcacggtgccaagacttggcacggtgccaactattggcacggtgccaaactttggcacggtgccaatgcttggcacggtgccaagtaggcgcgccatgcttcatcagactct

SEQ ID NO: 5361 - DNA, 197 bp, Artificial Sequence; identical to SEQ ID NO: 5360
  Synthetic polynucleotide

SEQ ID NO: 5362 - DNA, 197 bp, Artificial Sequence
  Synthetic polynucleotide
atcatctcaccttgcctcctgggcttcgatagagatgtcctgcaggaaaatgtatcaaattagaaaaatgtatcaaatttcgaaaatgtatcaaattgacaaaatgtatcaaattctaaaaatgtatcaaattactaaaatgtatcaaatttgcaaaatgtatcaaattgtaggcgcgccatgcttcatcagactct

SEQ ID NO: 5363 - DNA, 197 bp, Artificial Sequence; identical to SEQ ID NO: 5362
  Synthetic polynucleotide

SEQ ID NO: 5364 - DNA, 156 bp, Artificial Sequence
  Synthetic polynucleotide
atcatctcaccttgcctcctgtggacgatggtcactctcctgcaggaagaaatgagaaagaaatgtcgaagaaatggacaagaaatgctaaagaaatgactaagaaatgtgcaagaaatggtaaagaaatgggcgcgccatgcttcatcagactct

SEQ ID NO: 5365 - DNA, 156 bp, Artificial Sequence; identical to SEQ ID NO: 5364
  Synthetic polynucleotide

SEQ ID NO: 5366 - DNA, 164 bp, Artificial Sequence
  Synthetic polynucleotide
atcatctcaccttgcctcctgcgcgcacactaaattcgcctgcaggattgttctcagaattgttctctcgattgttctcgacattgttctcctaattgttctcactattgttctctgcattgttctcgtaattgttctcggcgcgccatgcttcatcagactct

SEQ ID NO: 5367 - DNA, 164 bp, Artificial Sequence; identical to SEQ ID NO: 5366
  Synthetic polynucleotide

SEQ ID NO: 5368 - DNA, 197 bp, Artificial Sequence
  Synthetic polynucleotide
atcatctcaccttgcctcctggagactcaattaggcgccctgcaggatgctaaaaatagaaagaatgctaaaaatagaatcgatgctaaaaatagaagacatgctaaaaatagaactaatgctaaaaatagaaactatgctaaaaatagaatgcatgctaaaaatagaagtaggcgcgccatgcttcatcagactct

SEQ ID NO: 5369 - DNA, 197 bp, Artificial Sequence; identical to SEQ ID NO: 5368
  Synthetic polynucleotide

SEQ ID NO: 5370 - DNA, 164 bp, Artificial Sequence
  Synthetic polynucleotide
atcatctcaccttgcctcctgcaagtaaatccgttcggcctgcaggattaattagagaattaattagtcgattaattaggacattaattagctaattaattagactattaattagtgcattaattaggtaattaattagggcgcgccatgcttcatcagactct

SEQ ID NO: 5371 - DNA, 164 bp, Artificial Sequence; identical to SEQ ID NO: 5370
  Synthetic polynucleotide

SEQ ID NO: 5372 - DNA, 180 bp, Artificial Sequence
  Synthetic polynucleotide
atcatctcaccttgcctcctgagcttagacacatccaacctgcaggagcaattaacaagaagcaattaacatcgagcaattaacagacagcaattaacactaagcaattaacaactagcaattaacatgcagcaattaacagtaagcaattaacaggcgcgccatgcttcatcagactct

SEQ ID NO: 5373 - DNA, 180 bp, Artificial Sequence; identical to SEQ ID NO: 5372
  Synthetic polynucleotide

SEQ ID NO: 5374 - DNA, 156 bp, Artificial Sequence
  Synthetic polynucleotide
atcatctcaccttgcctcctgccggcatctaagcagagcctgcaggaagaaatcagaaagaaatctcgaagaaatcgacaagaaatcctaaagaaatcactaagaaatctgcaagaaatcgtaaagaaatcggcgcgccatgcttcatcagactct

SEQ ID NO: 5375 - DNA, 156 bp, Artificial Sequence; identical to SEQ ID NO: 5374
  Synthetic polynucleotide

SEQ ID NO: 5376 - DNA, 164 bp, Artificial Sequence
  Synthetic polynucleotide
atcatctcaccttgcctcctgctatatctctcgagaaccctgcaggattaattacagaattaattactcgattaattacgacattaattacctaattaattacactattaattactgcattaattacgtaattaattacggcgcgccatgcttcatcagactct

SEQ ID NO: 5377 - DNA, 164 bp, Artificial Sequence; identical to SEQ ID NO: 5376
  Synthetic polynucleotide

SEQ ID NO: 5378 - DNA, 191 bp, Artificial Sequence
  Synthetic polynucleotide
atcatctcaccttgcctcctgtgttcttcggcactcgacctgcaggggaaggggggggcagggagaggaaggggggggcagggtcgggaaggggggggcaggggacggaaggggggggcagggctaggaaggggggggcagggactggaaggggggggcagggtgcggcgcgccatgcttcatcagactct

SEQ ID NO: 5379 - DNA, 191 bp, Artificial Sequence; identical to SEQ ID NO: 5378
  Synthetic polynucleotide

SEQ ID NO: 5380 - DNA, 172 bp, Artificial Sequence
  Synthetic polynucleotide
atcatctcaccttgcctcctgtatcatagagtcccttccctgcaggaccatggacaagaaccatggacatcgaccatggacagacaccatggacactaaccatggacaactaccatggacatgcaccatggacagtaaccatggacaggcgcgccatgcttcatcagactct

SEQ ID NO: 5381 - DNA, 172 bp, Artificial Sequence; identical to SEQ ID NO: 5380
  Synthetic polynucleotide

SEQ ID NO: 5382 - DNA, 185 bp, Artificial Sequence
  Synthetic polynucleotide
atcatctcaccttgcctcctgtagagcggaccctgcaacctgcaggaaagtaaacaaaaattagaaaagtaaacaaaaatttcgaaagtaaacaaaaattgacaaagtaaacaaaaattctaaaagtaaacaaaaattactaaagtaaacaaaaatttgcggcgcgccatgcttcatcagactct

SEQ ID NO: 5383 - DNA, 185 bp, Artificial Sequence; identical to SEQ ID NO: 5382
  Synthetic polynucleotide

SEQ ID NO: 5384 - DNA, 156 bp, Artificial Sequence
  Synthetic polynucleotide
atcatctcaccttgcctcctggcccaccaatcttatctcctgcaggacacctgcagaacacctgctcgacacctgcgacacacctgcctaacacctgcactacacctgctgcacacctgcgtaacacctgcggcgcgccatgcttcatcagactct

SEQ ID NO: 5385 - DNA, 156 bp, Artificial Sequence; identical to SEQ ID NO: 5384
  Synthetic polynucleotide

SEQ ID NO: 5386 - DNA, 190 bp, Artificial Sequence
  Synthetic polynucleotide
atcatctcaccttgcctcctgccggatcagtacaccatcctgcaggtttgcattacaatgagatttgcattacaatgtcgtttgcattacaatggactttgcattacaatgctatttgcattacaatgacttttgcattacaatgtgctttgcattacaatggtaggcgcgccatgcttcatcagactct

SEQ ID NO: 5387 - DNA, 190 bp, Artificial Sequence; identical to SEQ ID NO: 5386
  Synthetic polynucleotide

SEQ ID NO: 5388 - DNA, 180 bp, Artificial Sequence
  Synthetic polynucleotide
atcatctcaccttgcctcctgcagttgatctctggacacctgcaggcaccggaagtaagacaccggaagtatcgcaccggaagtagaccaccggaagtactacaccggaagtaactcaccggaagtatgccaccggaagtagtacaccggaagtaggcgcgccatgcttcatcagactct

SEQ ID NO: 5389 - DNA, 180 bp, Artificial Sequence; identical to SEQ ID NO: 5388
  Synthetic polynucleotide

SEQ ID NO: 5390 - DNA, 156 bp, Artificial Sequence
  Synthetic polynucleotide
atcatctcaccttgcctcctgcggcatcctattaagtccctgcaggaacggaagagaaacggaagtcgaacggaaggacaacggaagctaaacggaagactaacggaagtgcaacggaaggtaaacggaagggcgcgccatgcttcatcagactct

SEQ ID NO: 5391 - DNA, 156 bp, Artificial Sequence; identical to SEQ ID NO: 5390
  Synthetic polynucleotide

SEQ ID NO: 5392 - DNA, 172 bp, Artificial Sequence
  Synthetic polynucleotide
atcatctcaccttgcctcctggcggagaatacggactgcctgcagggccacgtgacagagccacgtgactcggccacgtgacgacgccacgtgacctagccacgtgacactgccacgtgactgcgccacgtgacgtagccacgtgacggcgcgccatgcttcatcagactct

SEQ ID NO: 5393 - DNA, 172 bp, Artificial Sequence; identical to SEQ ID NO: 5392
  Synthetic polynucleotide

SEQ ID NO: 5394 - DNA, 156 bp, Artificial Sequence
  Synthetic polynucleotide
atcatctcaccttgcctcctgtttgtggttgtgtgaatcctgcaggacacctggagaacacctggtcgacacctgggacacacctggctaacacctggactacacctggtgcacacctgggtaacacctggggcgcgccatgcttcatcagactct

SEQ ID NO: 5395 - DNA, 156 bp, Artificial Sequence; identical to SEQ ID NO: 5394
  Synthetic polynucleotide

SEQ ID NO: 5396 - DNA, 185 bp, Artificial Sequence
  Synthetic polynucleotide
atcatctcaccttgcctcctgtttgaccacgcattgcccctgcaggggattgacaggtctttagaggattgacaggtcttttcgggattgacaggtctttgacggattgacaggtctttctaggattgacaggtctttactggattgacaggtcttttgcggcgcgccatgcttcatcagactct

SEQ ID NO: 5397 - DNA, 185 bp, Artificial Sequence; identical to SEQ ID NO: 5396
  Synthetic polynucleotide

SEQ ID NO: 5398 - DNA, 191 bp, Artificial Sequence
  Synthetic polynucleotide
atcatctcaccttgcctcctgcggtcaaataccaagaccctgcagggacttaattaattaatcagagacttaattaattaatctcggacttaattaattaatcgacgacttaattaattaatcctagacttaattaattaatcactgacttaattaattaatctgcggcgcgccatgcttcatcagactct

SEQ ID NO: 5399 - DNA, 191 bp, Artificial Sequence; identical to SEQ ID NO: 5398
  Synthetic polynucleotide

SEQ ID NO: 5400 - DNA, 191 bp, Artificial Sequence
  Synthetic polynucleotide
atcatctcaccttgcctcctgcttccctgtcaggcaaccctgcaggatgatgacgtgtcctatagaatgatgacgtgtcctattcgatgatgacgtgtcctatgacatgatgacgtgtcctatctaatgatgacgtgtcctatactatgatgacgtgtcctattgcggcgcgccatgcttcatcagactct

SEQ ID NO: 5401 - DNA, 191 bp, Artificial Sequence; identical to SEQ ID NO: 5400
  Synthetic polynucleotide

SEQ ID NO: 5402 - DNA, 172 bp, Artificial Sequence
  Synthetic polynucleotide
atcatctcaccttgcctcctgtcgcaaggacatgaccccctgcaggggaagtgaaaagaggaagtgaaatcgggaagtgaaagacggaagtgaaactaggaagtgaaaactggaagtgaaatgcggaagtgaaagtaggaagtgaaaggcgcgccatgcttcatcagactct

SEQ ID NO: 5403 - DNA, 172 bp, Artificial Sequence; identical to SEQ ID NO: 5402
  Synthetic polynucleotide

SEQ ID NO: 5404 - DNA, 197 bp, Artificial Sequence
  Synthetic polynucleotide
atcatctcaccttgcctcctgcaagcagtcagcctatccctgcaggccttccttccttccttccagaccttccttccttccttcctcgccttccttccttccttccgacccttccttccttccttccctaccttccttccttccttccactccttccttccttccttcctgcggcgcgccatgcttcatcagactct

SEQ ID NO: 5405 - DNA, 197 bp, Artificial Sequence; identical to SEQ ID NO: 5404
  Synthetic polynucleotide

SEQ ID NO: 5406 - DNA, 172 bp, Artificial Sequence
  Synthetic polynucleotide
atcatctcaccttgcctcctgataacattacgggtactcctgcaggcacttccggcagacacttccggctcgcacttccggcgaccacttccggcctacacttccggcactcacttccggctgccacttccggcgtacacttccggcggcgcgccatgcttcatcagactct

SEQ ID NO: 5407 - DNA, 172 bp, Artificial Sequence; identical to SEQ ID NO: 5406
  Synthetic polynucleotide

SEQ ID NO: 5408 - DNA, 191 bp, Artificial Sequence
  Synthetic polynucleotide
atcatctcaccttgcctcctgtttataagcataccgcgcctgcagggggaaacggaaaccgaaactgagagggaaacggaaaccgaaactgtcggggaaacggaaaccgaaactggacgggaaacggaaaccgaaactgctagggaaacggaaaccgaaactgactggcgcgccatgcttcatcagactct

SEQ ID NO: 5409 - DNA, 191 bp, Artificial Sequence; identical to SEQ ID NO: 5408
  Synthetic polynucleotide

SEQ ID NO: 5410 - DNA, 156 bp, Artificial Sequence
  Synthetic polynucleotide
atcatctcaccttgcctcctggtgggtggagttatacacctgcagggtgacctcagagtgacctctcggtgacctcgacgtgacctcctagtgacctcactgtgacctctgcgtgacctcgtagtgacctcggcgcgccatgcttcatcagactct

SEQ ID NO: 5411 - DNA, 156 bp, Artificial Sequence; identical to SEQ ID NO: 5410
  Synthetic polynucleotide

SEQ ID NO: 5412 - DNA, 172 bp, Artificial Sequence
  Synthetic polynucleotide
atcatctcaccttgcctcctgtgataagaagacagtagcctgcaggaatttgcataagaaatttgcatatcgaatttgcatagacaatttgcatactaaatttgcataactaatttgcatatgcaatttgcatagtaaatttgcataggcgcgccatgcttcatcagactct

SEQ ID NO: 5413 - DNA, 172 bp, Artificial Sequence; identical to SEQ ID NO: 5412
  Synthetic polynucleotide

SEQ ID NO: 5414 - DNA, 156 bp, Artificial Sequence
  Synthetic polynucleotide
atcatctcaccttgcctcctggtaacgttaaaggtctgcctgcagggctattttagagctatttttcggctattttgacgctattttctagctattttactgctatttttgcgctattttgtagctattttggcgcgccatgcttcatcagactct

SEQ ID NO: 5415 - DNA, 156 bp, Artificial Sequence; identical to SEQ ID NO: 5414
  Synthetic polynucleotide

SEQ ID NO: 5416 - DNA, 179 bp, Artificial Sequence
  Synthetic polynucleotide
atcatctcaccttgcctcctggctctgtctgaggtgagcctgcagggggcaacaaatccctgcgccccgtagagggcaacaaatccctgcgccccgttcggggcaacaaatccctgcgccccgtgacgggcaacaaatccctgcgccccgtctaggcgcgccatgcttcatcagactct

SEQ ID NO: 5417 - DNA, 179 bp, Artificial Sequence; identical to SEQ ID NO: 5416
  Synthetic polynucleotide

SEQ ID NO: 5418 - DNA, 164 bp, Artificial Sequence
  Synthetic polynucleotide
atcatctcaccttgcctcctgtccgtaagaggcttgtccctgcaggaactgatgaagaaactgatgatcgaactgatgagacaactgatgactaaactgatgaactaactgatgatgcaactgatgagtaaactgatgaggcgcgccatgcttcatcagactct

SEQ ID NO: 5419 - DNA, 164 bp, Artificial Sequence; identical to SEQ ID NO: 5418
  Synthetic polynucleotide

SEQ ID NO: 5420 - DNA, 172 bp, Artificial Sequence
  Synthetic polynucleotide
atcatctcaccttgcctcctgatggacccacttaacatcctgcaggaacacctgtgagaaacacctgtgtcgaacacctgtggacaacacctgtgctaaacacctgtgactaacacctgtgtgcaacacctgtggtaaacacctgtgggcgcgccatgcttcatcagactct

SEQ ID NO: 5421 - DNA, 172 bp, Artificial Sequence; identical to SEQ ID NO: 5420
  Synthetic polynucleotide

SEQ ID NO: 5422 - DNA, 190 bp, Artificial Sequence
  Synthetic polynucleotide
atcatctcaccttgcctcctgttcattctatacgtggtcctgcaggctctgacgtcacccagactctgacgtcaccctcgctctgacgtcacccgacctctgacgtcacccctactctgacgtcacccactctctgacgtcaccctgcctctgacgtcacccgtaggcgcgccatgcttcatcagactct

SEQ ID NO: 5423 - DNA, 190 bp, Artificial Sequence; identical to SEQ ID NO: 5422
  Synthetic polynucleotide

SEQ ID NO: 5424 - DNA, 156 bp, Artificial Sequence
  Synthetic polynucleotide
atcatctcaccttgcctcctggtgaatggcagagacctcctgcaggcaggtcaaagacaggtcaatcgcaggtcaagaccaggtcaactacaggtcaaactcaggtcaatgccaggtcaagtacaggtcaaggcgcgccatgcttcatcagactct

SEQ ID NO: 5425 - DNA, 156 bp, Artificial Sequence; identical to SEQ ID NO: 5424
  Synthetic polynucleotide

SEQ ID NO: 5426 - DNA, 148 bp, Artificial Sequence
  Synthetic polynucleotide
atcatctcaccttgcctcctgctataggcatacactcacctgcagggccaacgagagccaacgtcggccaacggacgccaacgctagccaacgactgccaacgtgcgccaacggtagccaacgggcgcgccatgcttcatcagactct

SEQ ID NO: 5427 - DNA, 148 bp, Artificial Sequence; identical to SEQ ID NO: 5426
  Synthetic polynucleotide

SEQ ID NO: 5428 - DNA, 172 bp, Artificial Sequence
  Synthetic polynucleotide
atcatctcaccttgcctcctgcatcgacacaactaacgcctgcaggtttaattggtagatttaattggttcgtttaattggtgactttaattggtctatttaattggtacttttaattggttgctttaattggtgtatttaattggtggcgcgccatgcttcatcagactct

SEQ ID NO: 5429 - DNA, 172 bp, Artificial Sequence; identical to SEQ ID NO: 5428
  Synthetic polynucleotide

SEQ ID NO: 5430 - DNA, 188 bp, Artificial Sequence
  Synthetic polynucleotide
atcatctcaccttgcctcctgcggatccgaattcgtcgcctgcaggagtttcattttcagaagtttcattttctcgagtttcattttcgacagtttcattttcctaagtttcattttcactagtttcattttctgcagtttcattttcgtaagtttcattttcggcgcgccatgcttcatcagactct

SEQ ID NO: 5431 - DNA, 188 bp, Artificial Sequence; identical to SEQ ID NO: 5430
  Synthetic polynucleotide

SEQ ID NO: 5432 - DNA, 190 bp, Artificial Sequence
  Synthetic polynucleotide
atcatctcaccttgcctcctggtagctccgtgtaggttcctgcaggcttcgtggggggtcagacttcgtggggggtctcgcttcgtggggggtcgaccttcgtggggggtcctacttcgtggggggtcactcttcgtggggggtctgccttcgtggggggtcgtaggcgcgccatgcttcatcagactct

SEQ ID NO: 5433 - DNA, 190 bp, Artificial Sequence; identical to SEQ ID NO: 5432
  Synthetic polynucleotide

SEQ ID NO: 5434 - DNA, 172 bp, Artificial Sequence
  Synthetic polynucleotide
atcatctcaccttgcctcctgatctctcgaatgtatgacctgcaggaatggaaaatagaaatggaaaattcgaatggaaaatgacaatggaaaatctaaatggaaaatactaatggaaaattgcaatggaaaatgtaaatggaaaatggcgcgccatgcttcatcagactct

SEQ ID NO: 5435 - DNA, 172 bp, Artificial Sequence; identical to SEQ ID NO: 5434
  Synthetic polynucleotide

SEQ ID NO: 5436 - DNA, 156 bp, Artificial Sequence
  Synthetic polynucleotide
atcatctcaccttgcctcctgtatagctcattcgtatgcctgcaggaatcgataagaaatcgatatcgaatcgatagacaatcgatactaaatcgataactaatcgatatgcaatcgatagtaaatcgataggcgcgccatgcttcatcagactct

SEQ ID NO: 5437 - DNA, 156 bp, Artificial Sequence; identical to SEQ ID NO: 5436
  Synthetic polynucleotide

SEQ ID NO: 5438 - DNA, 188 bp, Artificial Sequence
  Synthetic polynucleotide
atcatctcaccttgcctcctggtgataggatccctgttcctgcaggtttgtttacttaagatttgtttacttatcgtttgtttacttagactttgtttacttactatttgtttacttaacttttgtttacttatgctttgtttacttagtatttgtttacttaggcgcgccatgcttcatcagactct

SEQ ID NO: 5439 - DNA, 188 bp, Artificial Sequence; identical to SEQ ID NO: 5438
  Synthetic polynucleotide

SEQ ID NO: 5440 - DNA, 172 bp, Artificial Sequence
  Synthetic polynucleotide
atcatctcaccttgcctcctgggatcgtataatcatcacctgcaggcgtgacccctagacgtgaccccttcgcgtgacccctgaccgtgacccctctacgtgacccctactcgtgaccccttgccgtgacccctgtacgtgacccctggcgcgccatgcttcatcagactct

SEQ ID NO: 5441 - DNA, 172 bp, Artificial Sequence; identical to SEQ ID NO: 5440
  Synthetic polynucleotide

SEQ ID NO: 5442 - DNA, 190 bp, Artificial Sequence
  Synthetic polynucleotide
atcatctcaccttgcctcctgatagtaccaaccgtttgcctgcagggtcgccataaacgcagagtcgccataaacgctcggtcgccataaacgcgacgtcgccataaacgcctagtcgccataaacgcactgtcgccataaacgctgcgtcgccataaacgcgtaggcgcgccatgcttcatcagactct

SEQ ID NO: 5443 - DNA, 190 bp, Artificial Sequence; identical to SEQ ID NO: 5442
  Synthetic polynucleotide

SEQ ID NO: 5444 - DNA, 188 bp, Artificial Sequence
  Synthetic polynucleotide
atcatctcaccttgcctcctgaagcttgggtaataagccctgcaggcaatgttattgtagacaatgttattgttcgcaatgttattgtgaccaatgttattgtctacaatgttattgtactcaatgttattgttgccaatgttattgtgtacaatgttattgtggcgcgccatgcttcatcagactct

SEQ ID NO: 5445 - DNA, 188 bp, Artificial Sequence; identical to SEQ ID NO: 5444
  Synthetic polynucleotide

SEQ ID NO: 5446 - DNA, 185 bp, Artificial Sequence
  Synthetic polynucleotide
atcatctcaccttgcctcctgagtctcccgttcttacacctgcagggctctgattggctgatagagctctgattggctgattcggctctgattggctgatgacgctctgattggctgatctagctctgattggctgatactgctctgattggctgattgcggcgcgccatgcttcatcagactct

SEQ ID NO: 5447 - DNA, 185 bp, Artificial Sequence; identical to SEQ ID NO: 5446
  Synthetic polynucleotide

SEQ ID NO: 5448 - DNA, 188 bp, Artificial Sequence
  Synthetic polynucleotide
atcatctcaccttgcctcctggctgtctagagcggcaacctgcaggggggatttcccaagaggggatttcccatcgggggatttcccagacggggatttcccactaggggatttcccaactggggatttcccatgcggggatttcccagtaggggatttcccaggcgcgccatgcttcatcagactct

SEQ ID NO: 5449 - DNA, 188 bp, Artificial Sequence; identical to SEQ ID NO: 5448
  Synthetic polynucleotide

SEQ ID NO: 5450 - DNA, 197 bp, Artificial Sequence
  Synthetic polynucleotide
atcatctcaccttgcctcctgatagtttcggttagtctcctgcaggaaagatcaaagggttagaaaagatcaaagggtttcgaaagatcaaagggttgacaaagatcaaagggttctaaaagatcaaagggttactaaagatcaaagggtttgcaaagatcaaagggttgtaggcgcgccatgcttcatcagactct

SEQ ID NO: 5451 - DNA, 197 bp, Artificial Sequence; identical to SEQ ID NO: 5450
  Synthetic polynucleotide

SEQ ID NO: 5452 - DNA, 191 bp, Artificial Sequence
  Synthetic polynucleotide
atcatctcaccttgcctcctgcctcaccgttcgaatctcctgcaggctggcaagttgccaaggagactggcaagttgccaaggtcgctggcaagttgccaagggacctggcaagttgccaaggctactggcaagttgccaaggactctggcaagttgccaaggtgcggcgcgccatgcttcatcagactct

SEQ ID NO: 5453 - DNA, 191 bp, Artificial Sequence; identical to SEQ ID NO: 5452
  Synthetic polynucleotide

SEQ ID NO: 5454 - DNA, 191 bp, Artificial Sequence
  Synthetic polynucleotide
atcatctcaccttgcctcctgatatgtcgaccttcagtcctgcaggaattttcacaccttttaagaaattttcacaccttttatcgaattttcacaccttttagacaattttcacaccttttactaaattttcacaccttttaactaattttcacaccttttatgcggcgcgccatgcttcatcagactct

SEQ ID NO: 5455 - DNA, 191 bp, Artificial Sequence; identical to SEQ ID NO: 5454
  Synthetic polynucleotide

SEQ ID NO: 5456 - DNA, 156 bp, Artificial Sequence
  Synthetic polynucleotide
atcatctcaccttgcctcctgtatcttaccgagggaaccctgcaggttgagtcaagattgagtcatcgttgagtcagacttgagtcactattgagtcaactttgagtcatgcttgagtcagtattgagtcaggcgcgccatgcttcatcagactct

SEQ ID NO: 5457 - DNA, 156 bp, Artificial Sequence; identical to SEQ ID NO: 5456
  Synthetic polynucleotide

SEQ ID NO: 5458 - DNA, 172 bp, Artificial Sequence
  Synthetic polynucleotide
atcatctcaccttgcctcctgatactgggaccctaagacctgcaggctcttccggtagactcttccggttcgctcttccggtgacctcttccggtctactcttccggtactctcttccggttgcctcttccggtgtactcttccggtggcgcgccatgcttcatcagactct

SEQ ID NO: 5459 - DNA, 172 bp, Artificial Sequence; identical to SEQ ID NO: 5458
  Synthetic polynucleotide

SEQ ID NO: 5460 - DNA, 191 bp, Artificial Sequence
  Synthetic polynucleotide
atcatctcaccttgcctcctgtaccaggccatacagcgcctgcagggggggcatcaggaggggagagggggcatcaggaggggtcggggggcatcaggagggggacgggggcatcaggaggggctagggggcatcaggaggggactgggggcatcaggaggggtgcggcgcgccatgcttcatcagactct

SEQ ID NO: 5461 - DNA, 191 bp, Artificial Sequence; identical to SEQ ID NO: 5460
  Synthetic polynucleotide

SEQ ID NO: 5462 - DNA, 197 bp, Artificial Sequence
  Synthetic polynucleotide
atcatctcaccttgcctcctgaaggactttgtcatcggcctgcaggatgaatgttattcatagaatgaatgttattcattcgatgaatgttattcatgacatgaatgttattcatctaatgaatgttattcatactatgaatgttattcattgcatgaatgttattcatgtaggcgcgccatgcttcatcagactct

SEQ ID NO: 5463 - DNA, 197 bp, Artificial Sequence; identical to SEQ ID NO: 5462
  Synthetic polynucleotide

SEQ ID NO: 5464 - DNA, 156 bp, Artificial Sequence
  Synthetic polynucleotide
atcatctcaccttgcctcctgacaggctagtggctagacctgcaggcttatctcagacttatctctcgcttatctcgaccttatctcctacttatctcactcttatctctgccttatctcgtacttatctcggcgcgccatgcttcatcagactct

SEQ ID NO: 5465 - DNA, 156 bp, Artificial Sequence; identical to SEQ ID NO: 5464
  Synthetic polynucleotide

SEQ ID NO: 5466 - DNA, 188 bp, Artificial Sequence
  Synthetic polynucleotide
atcatctcaccttgcctcctgagtcgttcgtttgagatcctgcaggggaaaaaatcggagaggaaaaaatcggtcgggaaaaaatcgggacggaaaaaatcggctaggaaaaaatcggactggaaaaaatcggtgcggaaaaaatcgggtaggaaaaaatcggggcgcgccatgcttcatcagactct

SEQ ID NO: 5467 - DNA, 188 bp, Artificial Sequence; identical to SEQ ID NO: 5466
  Synthetic polynucleotide

SEQ ID NO: 5468 - DNA, 188 bp, Artificial Sequence
  Synthetic polynucleotide
atcatctcaccttgcctcctgaatgtagttagctcttgcctgcaggtttggcgcgaaaagatttggcgcgaaatcgtttggcgcgaaagactttggcgcgaaactatttggcgcgaaaacttttggcgcgaaatgctttggcgcgaaagtatttggcgcgaaaggcgcgccatgcttcatcagactct

SEQ ID NO: 5469 - DNA, 188 bp, Artificial Sequence; identical to SEQ ID NO: 5468
  Synthetic polynucleotide

SEQ ID NO: 5470 - DNA, 197 bp, Artificial Sequence
  Synthetic polynucleotide
atcatctcaccttgcctcctgcacaacggtggagaacccctgcaggttgttggcggggtcaagattgttggcggggtcatcgttgttggcggggtcagacttgttggcggggtcactattgttggcggggtcaactttgttggcggggtcatgcttgttggcggggtcagtaggcgcgccatgcttcatcagactct

SEQ ID NO: 5471 - DNA, 197 bp, Artificial Sequence; identical to SEQ ID NO: 5470
  Synthetic polynucleotide

SEQ ID NO: 5472 - DNA, 197 bp, Artificial Sequence
  Synthetic polynucleotide
atcatctcaccttgcctcctgtcttagtcgtaaccacacctgcagggttaatccgattaacagagttaatccgattaactcggttaatccgattaacgacgttaatccgattaacctagttaatccgattaacactgttaatccgattaactgcgttaatccgattaacgtaggcgcgccatgcttcatcagactct

SEQ ID NO: 5473 - DNA, 197 bp, Artificial Sequence; identical to SEQ ID NO: 5472
  Synthetic polynucleotide

SEQ ID NO: 5474 - DNA, 197 bp, Artificial Sequence
  Synthetic polynucleotide
atcatctcaccttgcctcctgctagatcagtgttgatacctgcaggaacaatggtagtgttagaaacaatggtagtgtttcgaacaatggtagtgttgacaacaatggtagtgttctaaacaatggtagtgttactaacaatggtagtgtttgcaacaatggtagtgttgtaggcgcgccatgcttcatcagactct

SEQ ID NO: 5475 - DNA, 197 bp, Artificial Sequence; identical to SEQ ID NO: 5474
  Synthetic polynucleotide

SEQ ID NO: 5476 - DNA, 197 bp, Artificial Sequence
  Synthetic polynucleotide
atcatctcaccttgcctcctgtcagcgccagagacctacctgcaggagtgcgtgggcgtagagaagtgcgtgggcgtagtcgagtgcgtgggcgtaggacagtgcgtgggcgtagctaagtgcgtgggcgtagactagtgcgtgggcgtagtgcagtgcgtgggcgtaggtaggcgcgccatgcttcatcagactct

SEQ ID NO: 5477 - DNA, 197 bp, Artificial Sequence; identical to SEQ ID NO: 5476
  Synthetic polynucleotide

SEQ ID NO: 5478 - DNA, 195 bp, Artificial Sequence
  Synthetic polynucleotide
atcatctcaccttgcctcctgcaccgtatcttcctcaacctgcaggtgtatggtcacgcttcaggtatctgtttagatgtatggtcacgcttcaggtatctgttttcgtgtatggtcacgcttcaggtatctgtttgactgtatggtcacgcttcaggtatctgtttctaggcgcgccatgcttcatcagactct

SEQ ID NO: 5479 - DNA, 195 bp, Artificial Sequence; identical to SEQ ID NO: 5478
  Synthetic polynucleotide

SEQ ID NO: 5480 - DNA, 164 bp, Artificial Sequence
  Synthetic polynucleotide
atcatctcaccttgcctcctgagcttgtaacacagcggcctgcaggaaggacaggagaaaggacaggtcgaaggacagggacaaggacaggctaaaggacaggactaaggacaggtgcaaggacagggtaaaggacaggggcgcgccatgcttcatcagactct

SEQ ID NO: 5481 - DNA, 164 bp, Artificial Sequence; identical to SEQ ID NO: 5480
  Synthetic polynucleotide

SEQ ID NO: 5482 - DNA, 156 bp, Artificial Sequence
  Synthetic polynucleotide
atcatctcaccttgcctcctgagaacgtagtcctgccccctgcaggaaccgaaaagaaaccgaaatcgaaccgaaagacaaccgaaactaaaccgaaaactaaccgaaatgcaaccgaaagtaaaccgaaaggcgcgccatgcttcatcagactct

SEQ ID NO: 5483 - DNA, 156 bp, Artificial Sequence; identical to SEQ ID NO: 5482
  Synthetic polynucleotide

SEQ ID NO: 5484 - DNA, 156 bp, Artificial Sequence
  Synthetic polynucleotide
atcatctcaccttgcctcctgtatcttctcaatacggccctgcagggtgaccttagagtgacctttcggtgaccttgacgtgaccttctagtgaccttactgtgacctttgcgtgaccttgtagtgaccttggcgcgccatgcttcatcagactct

SEQ ID NO: 5485 - DNA, 156 bp, Artificial Sequence; identical to SEQ ID NO: 5484
  Synthetic polynucleotide

SEQ ID NO: 5486 - DNA, 188 bp, Artificial Sequence
  Synthetic polynucleotide
atcatctcaccttgcctcctggctggctgtgatcgcaacctgcaggtatgcaaattagagatatgcaaattagtcgtatgcaaattaggactatgcaaattagctatatgcaaattagacttatgcaaattagtgctatgcaaattaggtatatgcaaattagggcgcgccatgcttcatcagactct

SEQ ID NO: 5487 - DNA, 188 bp, Artificial Sequence; identical to SEQ ID NO: 5486
  Synthetic polynucleotide

SEQ ID NO: 5488 - DNA, 191 bp, Artificial Sequence
  Synthetic polynucleotide
atcatctcaccttgcctcctgccggcaatatgtacttgcctgcaggtttattatgcatattttagatttattatgcatatttttcgtttattatgcatattttgactttattatgcatattttctatttattatgcatattttacttttattatgcatatttttgcggcgcgccatgcttcatcagactct

SEQ ID NO: 5489 - DNA, 191 bp, Artificial Sequence; identical to SEQ ID NO: 5488
  Synthetic polynucleotide

SEQ ID NO: 5490 - DNA, 180 bp, Artificial Sequence
  Synthetic polynucleotide
atcatctcaccttgcctcctgactttctttggcgccgccctgcaggtaatggcggacagataatggcggactcgtaatggcggacgactaatggcggacctataatggcggacacttaatggcggactgctaatggcggacgtataatggcggacggcgcgccatgcttcatcagactct

SEQ ID NO: 5491 - DNA, 180 bp, Artificial Sequence; identical to SEQ ID NO: 5490
  Synthetic polynucleotide

SEQ ID NO: 5492 - DNA, 183 bp, Artificial Sequence
  Synthetic polynucleotide
atcatctcaccttgcctcctgaacaaaccagccctaaacctgcaggtgccatcagaggtgtgagaagcgacagatgccatcagaggtgtgagaagcgactcgtgccatcagaggtgtgagaagcgacgactgccatcagaggtgtgagaagcgacctaggcgcgccatgcttcatcagactct

SEQ ID NO: 5493 - DNA, 183 bp, Artificial Sequence; identical to SEQ ID NO: 5492
  Synthetic polynucleotide

SEQ ID NO: 5494 - DNA, 180 bp, Artificial Sequence
  Synthetic polynucleotide
atcatctcaccttgcctcctggatggcatcctggctgtcctgcaggctaatcctcttagactaatcctctttcgctaatcctcttgacctaatcctcttctactaatcctcttactctaatcctctttgcctaatcctcttgtactaatcctcttggcgcgccatgcttcatcagactct

SEQ ID NO: 5495 - DNA, 180 bp, Artificial Sequence; identical to SEQ ID NO: 5494
  Synthetic polynucleotide

SEQ ID NO: 5496 - DNA, 188 bp, Artificial Sequence
  Synthetic polynucleotide
atcatctcaccttgcctcctggaaaggtacgggtggctcctgcaggaatttgtttacaagaaatttgtttacatcgaatttgtttacagacaatttgtttacactaaatttgtttacaactaatttgtttacatgcaatttgtttacagtaaatttgtttacaggcgcgccatgcttcatcagactct

SEQ ID NO: 5497 - DNA, 188 bp, Artificial Sequence; identical to SEQ ID NO: 5496
  Synthetic polynucleotide

SEQ ID NO: 5498 - DNA, 156 bp, Artificial Sequence
  Synthetic polynucleotide
atcatctcaccttgcctcctgtcgtccatggcatagctcctgcaggcttatctgagacttatctgtcgcttatctggaccttatctgctacttatctgactcttatctgtgccttatctggtacttatctgggcgcgccatgcttcatcagactct

SEQ ID NO: 5499 - DNA, 156 bp, Artificial Sequence; identical to SEQ ID NO: 5498
  Synthetic polynucleotide

SEQ ID NO: 5500 - DNA, 156 bp, Artificial Sequence
  Synthetic polynucleotide
atcatctcaccttgcctcctgttgaagactttggacaccctgcagggagataagagagagataagtcggagataaggacgagataagctagagataagactgagataagtgcgagataaggtagagataagggcgcgccatgcttcatcagactct

SEQ ID NO: 5501 - DNA, 156 bp, Artificial Sequence; identical to SEQ ID NO: 5500
  Synthetic polynucleotide

SEQ ID NO: 5502 - DNA, 164 bp, Artificial Sequence
  Synthetic polynucleotide
atcatctcaccttgcctcctgtacgaaacgtagtcgtgcctgcaggatcataaaaagaatcataaaatcgatcataaaagacatcataaaactaatcataaaaactatcataaaatgcatcataaaagtaatcataaaaggcgcgccatgcttcatcagactct

SEQ ID NO: 5503 - DNA, 164 bp, Artificial Sequence; identical to SEQ ID NO: 5502
  Synthetic polynucleotide

SEQ ID NO: 5504 - DNA, 180 bp, Artificial Sequence
  Synthetic polynucleotide
atcatctcaccttgcctcctgatcagatctctcgtaggcctgcaggttatcttgtctagattatcttgtcttcgttatcttgtctgacttatcttgtctctattatcttgtctactttatcttgtcttgcttatcttgtctgtattatcttgtctggcgcgccatgcttcatcagactct

SEQ ID NO: 5505 - DNA, 180 bp, Artificial Sequence; identical to SEQ ID NO: 5504
  Synthetic polynucleotide

SEQ ID NO: 5506 - DNA, 164 bp, Artificial Sequence
  Synthetic polynucleotide
atcatctcaccttgcctcctgtactaagatcagcgtgacctgcaggcctcacctgagacctcacctgtcgcctcacctggaccctcacctgctacctcacctgactcctcacctgtgccctcacctggtacctcacctgggcgcgccatgcttcatcagactct

SEQ ID NO: 5507 - DNA, 164 bp, Artificial Sequence; identical to SEQ ID NO: 5506
  Synthetic polynucleotide

SEQ ID NO: 5508 - DNA, 164 bp, Artificial Sequence
  Synthetic polynucleotide
atcatctcaccttgcctcctggtgtgctaaatagtgttcctgcaggtggcgtcacagatggcgtcactcgtggcgtcacgactggcgtcacctatggcgtcacacttggcgtcactgctggcgtcacgtatggcgtcacggcgcgccatgcttcatcagactct

SEQ ID NO: 5509 - DNA, 164 bp, Artificial Sequence; identical to SEQ ID NO: 5508
  Synthetic polynucleotide

SEQ ID NO: 5510 - DNA, 197 bp, Artificial Sequence
  Synthetic polynucleotide
atcatctcaccttgcctcctgtaaaccgaatcatgatgcctgcaggaccgcctcaggcggtagaaccgcctcaggcggttcgaccgcctcaggcggtgacaccgcctcaggcggtctaaccgcctcaggcggtactaccgcctcaggcggttgcaccgcctcaggcggtgtaggcgcgccatgcttcatcagactct

SEQ ID NO: 5511 - DNA, 197 bp, Artificial Sequence; identical to SEQ ID NO: 5510
  Synthetic polynucleotide

SEQ ID NO: 5512 - DNA, 191 bp, Artificial Sequence
  Synthetic polynucleotide
atcatctcaccttgcctcctggcgcccggtgagtatttcctgcaggggaggggattaatttatagaggaggggattaatttattcgggaggggattaatttatgacggaggggattaatttatctaggaggggattaatttatactggaggggattaatttattgcggcgcgccatgcttcatcagactct

SEQ ID NO: 5513 - DNA, 191 bp, Artificial Sequence; identical to SEQ ID NO: 5512
  Synthetic polynucleotide

SEQ ID NO: 5514 - DNA, 185 bp, Artificial Sequence
  Synthetic polynucleotide
atcatctcaccttgcctcctgaaaccgccgcctataaacctgcaggtaattagcgctaattaagataattagcgctaattatcgtaattagcgctaattagactaattagcgctaattactataattagcgctaattaacttaattagcgctaattatgcggcgcgccatgcttcatcagactct

SEQ ID NO: 5515 - DNA, 185 bp, Artificial Sequence; identical to SEQ ID NO: 5514
  Synthetic polynucleotide

SEQ ID NO: 5516 - DNA, 191 bp, Artificial Sequence
  Synthetic polynucleotide
atcatctcaccttgcctcctgtgtcctctcaacgctgacctgcaggaaggtcacggtgacctgagaaaggtcacggtgacctgtcgaaggtcacggtgacctggacaaggtcacggtgacctgctaaaggtcacggtgacctgactaaggtcacggtgacctgtgcggcgcgccatgcttcatcagactct

SEQ ID NO: 5517 - DNA, 191 bp, Artificial Sequence; identical to SEQ ID NO: 5516
  Synthetic polynucleotide

SEQ ID NO: 5518 - DNA, 164 bp, Artificial Sequence
  Synthetic polynucleotide
atcatctcaccttgcctcctgggacctgcccagatcaacctgcaggttttatgatagattttatgattcgttttatgatgacttttatgatctattttatgatactttttatgattgcttttatgatgtattttatgatggcgcgccatgcttcatcagactct

SEQ ID NO: 5519 - DNA, 164 bp, Artificial Sequence; identical to SEQ ID NO: 5518
  Synthetic polynucleotide

SEQ ID NO: 5520 - DNA, 197 bp, Artificial Sequence
  Synthetic polynucleotide
atcatctcaccttgcctcctggggataaggcagaacagcctgcaggagctaaaaatagcatagaagctaaaaatagcattcgagctaaaaatagcatgacagctaaaaatagcatctaagctaaaaatagcatactagctaaaaatagcattgcagctaaaaatagcatgtaggcgcgccatgcttcatcagactct

SEQ ID NO: 5521 - DNA, 197 bp, Artificial Sequence; identical to SEQ ID NO: 5520
  Synthetic polynucleotide

SEQ ID NO: 5522 - DNA, 164 bp, Artificial Sequence
  Synthetic polynucleotide
atcatctcaccttgcctcctgttctcacagttagggaccctgcaggggtttggctagaggtttggcttcgggtttggctgacggtttggctctaggtttggctactggtttggcttgcggtttggctgtaggtttggctggcgcgccatgcttcatcagactct

SEQ ID NO: 5523 - DNA, 164 bp, Artificial Sequence; identical to SEQ ID NO: 5522
  Synthetic polynucleotide

SEQ ID NO: 5524 - DNA, 191 bp, Artificial Sequence
  Synthetic polynucleotide
atcatctcaccttgcctcctgtaatttcggacttcaaccctgcaggtaaagggattaacgattagataaagggattaacgatttcgtaaagggattaacgattgactaaagggattaacgattctataaagggattaacgattacttaaagggattaacgatttgcggcgcgccatgcttcatcagactct

SEQ ID NO: 5525 - DNA, 191 bp, Artificial Sequence; identical to SEQ ID NO: 5524
  Synthetic polynucleotide

SEQ ID NO: 5526 - DNA, 172 bp, Artificial Sequence
  Synthetic polynucleotide
atcatctcaccttgcctcctgtccctggctttgcctaccctgcaggtgacctgaccagatgacctgacctcgtgacctgaccgactgacctgaccctatgacctgaccacttgacctgacctgctgacctgaccgtatgacctgaccggcgcgccatgcttcatcagactct

SEQ ID NO: 5527 - DNA, 172 bp, Artificial Sequence; identical to SEQ ID NO: 5526
  Synthetic polynucleotide

SEQ ID NO: 5528 - DNA, 186 bp, Artificial Sequence
  Synthetic polynucleotide
atcatctcaccttgcctcctggcaaagccagggaaatgcctgcaggtcagcaccacggacagcaccagatcagcaccacggacagcacctcgtcagcaccacggacagcaccgactcagcaccacggacagcaccctatcagcaccacggacagcaccactggcgcgccatgcttcatcagactct

SEQ ID NO: 5529 - DNA, 186 bp, Artificial Sequence; identical to SEQ ID NO: 5528
  Synthetic polynucleotide

SEQ ID NO: 5530 - DNA, 172 bp, Artificial Sequence
  Synthetic polynucleotide
atcatctcaccttgcctcctgcttcaagatagggcgaccctgcaggtatgactcatagatatgactcattcgtatgactcatgactatgactcatctatatgactcatacttatgactcattgctatgactcatgtatatgactcatggcgcgccatgcttcatcagactct

SEQ ID NO: 5531 - DNA, 172 bp, Artificial Sequence; identical to SEQ ID NO: 5530
  Synthetic polynucleotide

SEQ ID NO: 5532 - DNA, 197 bp, Artificial Sequence
  Synthetic polynucleotide
atcatctcaccttgcctcctgttggtaagacccaccggcctgcaggggtcacgtggccgcgagaggtcacgtggccgcgtcgggtcacgtggccgcggacggtcacgtggccgcgctaggtcacgtggccgcgactggtcacgtggccgcgtgcggtcacgtggccgcggtaggcgcgccatgcttcatcagactct

SEQ ID NO: 5533 - DNA, 197 bp, Artificial Sequence; identical to SEQ ID NO: 5532
  Synthetic polynucleotide

SEQ ID NO: 5534 - DNA, 148 bp, Artificial Sequence
  Synthetic polynucleotide
atcatctcaccttgcctcctgatggaagtatctttgcacctgcaggctccgggagactccgggtcgctccggggacctccgggctactccgggactctccgggtgcctccggggtactccgggggcgcgccatgcttcatcagactct

SEQ ID NO: 5535 - DNA, 148 bp, Artificial Sequence; identical to SEQ ID NO: 5534
  Synthetic polynucleotide

SEQ ID NO: 5536 - DNA, 191 bp, Artificial Sequence
  Synthetic polynucleotide
atcatctcaccttgcctcctgcaaggctacggctgtgtcctgcaggacctttgtttacatttaagaacctttgtttacatttatcgacctttgtttacatttagacacctttgtttacatttactaacctttgtttacatttaactacctttgtttacatttatgcggcgcgccatgcttcatcagactct

SEQ ID NO: 5537 - DNA, 191 bp, Artificial Sequence; identical to SEQ ID NO: 5536
  Synthetic polynucleotide

SEQ ID NO: 5538 - DNA, 197 bp, Artificial Sequence
  Synthetic polynucleotide
atcatctcaccttgcctcctgttccagacgctcagctccctgcaggggttaatgattaccaagaggttaatgattaccatcgggttaatgattaccagacggttaatgattaccactaggttaatgattaccaactggttaatgattaccatgcggttaatgattaccagtaggcgcgccatgcttcatcagactct

SEQ ID NO: 5539 - DNA, 197 bp, Artificial Sequence; identical to SEQ ID NO: 5538
  Synthetic polynucleotide

SEQ ID NO: 5540 - DNA, 197 bp, Artificial Sequence
  Synthetic polynucleotide
atcatctcaccttgcctcctgacgaaaccggagtctcacctgcagggacatgcccgggcatgttagagacatgcccgggcatgtttcggacatgcccgggcatgttgacgacatgcccgggcatgttctagacatgcccgggcatgttactgacatgcccgggcatgtttgcggcgcgccatgcttcatcagactct

SEQ ID NO: 5541 - DNA, 197 bp, Artificial Sequence; identical to SEQ ID NO: 5540
  Synthetic polynucleotide

SEQ ID NO: 5542 - DNA, 191 bp, Artificial Sequence
  Synthetic polynucleotide
atcatctcaccttgcctcctgaatcttgttgcctggtccctgcagggagcgttaattaatgtaagagagcgttaattaatgtatcggagcgttaattaatgtagacgagcgttaattaatgtactagagcgttaattaatgtaactgagcgttaattaatgtatgcggcgcgccatgcttcatcagactct

SEQ ID NO: 5543 - DNA, 191 bp, Artificial Sequence; identical to SEQ ID NO: 5542
  Synthetic polynucleotide

SEQ ID NO: 5544 - DNA, 196 bp, Artificial Sequence
  Synthetic polynucleotide
atcatctcaccttgcctcctgttcagacttctctcgggcctgcagggtgatttatggccagagtgatttatggcctcggtgatttatggccgacgtgatttatggccctagtgatttatggccactgtgatttatggcctgcgtgatttatggccgtagtgatttatggccggcgcgccatgcttcatcagactct

SEQ ID NO: 5545 - DNA, 196 bp, Artificial Sequence; identical to SEQ ID NO: 5544
  Synthetic polynucleotide

SEQ ID NO: 5546 - DNA, 156 bp, Artificial Sequence
  Synthetic polynucleotide
atcatctcaccttgcctcctgaagtgaagtctacccagcctgcagggcacctgcagagcacctgctcggcacctgcgacgcacctgcctagcacctgcactgcacctgctgcgcacctgcgtagcacctgcggcgcgccatgcttcatcagactct

SEQ ID NO: 5547 - DNA, 156 bp, Artificial Sequence; identical to SEQ ID NO: 5546
  Synthetic polynucleotide

SEQ ID NO: 5548 - DNA, 172 bp, Artificial Sequence
  Synthetic polynucleotide
atcatctcaccttgcctcctggttaaggaagtagaagacctgcaggttgacaccttagattgacacctttcgttgacaccttgacttgacaccttctattgacaccttactttgacacctttgcttgacaccttgtattgacaccttggcgcgccatgcttcatcagactct

SEQ ID NO: 5549 - DNA, 172 bp, Artificial Sequence; identical to SEQ ID NO: 5548
  Synthetic polynucleotide

SEQ ID NO: 5550 - DNA, 190 bp, Artificial Sequence
  Synthetic polynucleotide
atcatctcaccttgcctcctgacgacacgtgttggttccctgcaggctctgacgtcatcgagactctgacgtcatcgtcgctctgacgtcatcggacctctgacgtcatcgctactctgacgtcatcgactctctgacgtcatcgtgcctctgacgtcatcggtaggcgcgccatgcttcatcagactct

SEQ ID NO: 5551 - DNA, 190 bp, Artificial Sequence; identical to SEQ ID NO: 5550
  Synthetic polynucleotide

SEQ ID NO: 5552 - DNA, 190 bp, Artificial Sequence
  Synthetic polynucleotide
atcatctcaccttgcctcctgttggcttgtaagtatgccctgcaggcaaacgtaaacaatagacaaacgtaaacaattcgcaaacgtaaacaatgaccaaacgtaaacaatctacaaacgtaaacaatactcaaacgtaaacaattgccaaacgtaaacaatgtaggcgcgccatgcttcatcagactct

SEQ ID NO: 5553 - DNA, 190 bp, Artificial Sequence; identical to SEQ ID NO: 5552
  Synthetic polynucleotide

SEQ ID NO: 5554 - DNA, 156 bp, Artificial Sequence
  Synthetic polynucleotide
atcatctcaccttgcctcctgtgtttgcggcagaacatcctgcaggccgcacctagaccgcaccttcgccgcacctgacccgcacctctaccgcacctactccgcaccttgcccgcacctgtaccgcacctggcgcgccatgcttcatcagactct

SEQ ID NO: 5555 - DNA, 156 bp, Artificial Sequence; identical to SEQ ID NO: 5554
  Synthetic polynucleotide

SEQ ID NO: 5556 - DNA, 197 bp, Artificial Sequence
  Synthetic polynucleotide
atcatctcaccttgcctcctgtgtattgtaaagagggccctgcaggaagttcaaggtcagcagaaagttcaaggtcagctcgaagttcaaggtcagcgacaagttcaaggtcagcctaaagttcaaggtcagcactaagttcaaggtcagctgcaagttcaaggtcagcgtaggcgcgccatgcttcatcagactct

SEQ ID NO: 5557 - DNA, 197 bp, Artificial Sequence; identical to SEQ ID NO: 5556
  Synthetic polynucleotide

SEQ ID NO: 5558 - DNA, 197 bp, Artificial Sequence
  Synthetic polynucleotide
atcatctcaccttgcctcctgtggaacctatatcagtacctgcaggtaattggtttttaattgcagataattggtttttaattgctcgtaattggtttttaattgcgactaattggtttttaattgcctataattggtttttaattgcacttaattggtttttaattgctgcggcgcgccatgcttcatcagactct

SEQ ID NO: 5559 - DNA, 197 bp, Artificial Sequence; identical to SEQ ID NO: 5558
  Synthetic polynucleotide

SEQ ID NO: 5560 - DNA, 164 bp, Artificial Sequence
  Synthetic polynucleotide
atcatctcaccttgcctcctgaaccacataggacggctcctgcaggttttatgagagattttatgagtcgttttatgaggacttttatgagctattttatgagactttttatgagtgcttttatgaggtattttatgagggcgcgccatgcttcatcagactct

SEQ ID NO: 5561 - DNA, 164 bp, Artificial Sequence; identical to SEQ ID NO: 5560
  Synthetic polynucleotide

SEQ ID NO: 5562 - DNA, 172 bp, Artificial Sequence
  Synthetic polynucleotide
atcatctcaccttgcctcctgcgggtccattagcataacctgcaggaaggggaagtagaaaggggaagttcgaaggggaagtgacaaggggaagtctaaaggggaagtactaaggggaagttgcaaggggaagtgtaaaggggaagtggcgcgccatgcttcatcagactct

SEQ ID NO: 5563 - DNA, 172 bp, Artificial Sequence; identical to SEQ ID NO: 5562
  Synthetic polynucleotide

SEQ ID NO: 5564 - DNA, 164 bp, Artificial Sequence
  Synthetic polynucleotide
atcatctcaccttgcctcctggtctacgctccctatttcctgcaggtttcccacgagatttcccacgtcgtttcccacggactttcccacgctatttcccacgacttttcccacgtgctttcccacggtatttcccacgggcgcgccatgcttcatcagactct

SEQ ID NO: 5565 - DNA, 164 bp, Artificial Sequence; identical to SEQ ID NO: 5564
  Synthetic polynucleotide

SEQ ID NO: 5566 - DNA, 190 bp, Artificial Sequence
  Synthetic polynucleotide
atcatctcaccttgcctcctgttagtggcgtaccgggtcctgcaggctaatcatcattaaagactaatcatcattaatcgctaatcatcattaagacctaatcatcattaactactaatcatcattaaactctaatcatcattaatgcctaatcatcattaagtaggcgcgccatgcttcatcagactct

SEQ ID NO: 5567 - DNA, 190 bp, Artificial Sequence; identical to SEQ ID NO: 5566
  Synthetic polynucleotide

SEQ ID NO: 5568 - DNA, 188 bp, Artificial Sequence
  Synthetic polynucleotide
atcatctcaccttgcctcctggagggttaaggaagaaccctgcaggtaccacgtgtcaagataccacgtgtcatcgtaccacgtgtcagactaccacgtgtcactataccacgtgtcaacttaccacgtgtcatgctaccacgtgtcagtataccacgtgtcaggcgcgccatgcttcatcagactct

SEQ ID NO: 5569 - DNA, 188 bp, Artificial Sequence; identical to SEQ ID NO: 5568
  Synthetic polynucleotide

SEQ ID NO: 5570 - DNA, 180 bp, Artificial Sequence
  Synthetic polynucleotide
atcatctcaccttgcctcctggttaggtgagcgttgtacctgcaggttttaattggtagattttaattggttcgttttaattggtgacttttaattggtctattttaattggtactttttaattggttgcttttaattggtgtattttaattggtggcgcgccatgcttcatcagactct

SEQ ID NO: 5571 - DNA, 180 bp, Artificial Sequence; identical to SEQ ID NO: 5570
  Synthetic polynucleotide

SEQ ID NO: 5572 - DNA, 172 bp, Artificial Sequence
  Synthetic polynucleotide
atcatctcaccttgcctcctgcagagatccaatactaccctgcaggtgtttgctttagatgtttgcttttcgtgtttgctttgactgtttgctttctatgtttgctttacttgtttgcttttgctgtttgctttgtatgtttgctttggcgcgccatgcttcatcagactct

SEQ ID NO: 5573 - DNA, 172 bp, Artificial Sequence; identical to SEQ ID NO: 5572
  Synthetic polynucleotide

SEQ ID NO: 5574 - DNA, 172 bp, Artificial Sequence
  Synthetic polynucleotide
atcatctcaccttgcctcctgcgacggatcttcttacccctgcaggcacttccggtagacacttccggttcgcacttccggtgaccacttccggtctacacttccggtactcacttccggttgccacttccggtgtacacttccggtggcgcgccatgcttcatcagactct

SEQ ID NO: 5575 - DNA, 172 bp, Artificial Sequence; identical to SEQ ID NO: 5574
  Synthetic polynucleotide

SEQ ID NO: 5576 - DNA, 172 bp, Artificial Sequence
  Synthetic polynucleotide
atcatctcaccttgcctcctgaggatctgatgcagcctcctgcaggaaggtgtcaaagaaaggtgtcaatcgaaggtgtcaagacaaggtgtcaactaaaggtgtcaaactaaggtgtcaatgcaaggtgtcaagtaaaggtgtcaaggcgcgccatgcttcatcagactct

SEQ ID NO: 5577 - DNA, 172 bp, Artificial Sequence; identical to SEQ ID NO: 5576
  Synthetic polynucleotide

SEQ ID NO: 5578 - DNA, 156 bp, Artificial Sequence
  Synthetic polynucleotide
atcatctcaccttgcctcctggatcagcataacgctcgcctgcaggtataaacaagatataaacatcgtataaacagactataaacactatataaacaacttataaacatgctataaacagtatataaacaggcgcgccatgcttcatcagactct

SEQ ID NO: 5579 - DNA, 156 bp, Artificial Sequence; identical to SEQ ID NO: 5578
  Synthetic polynucleotide

SEQ ID NO: 5580 - DNA, 172 bp, Artificial Sequence
  Synthetic polynucleotide
atcatctcaccttgcctcctgaggatcctacattgtcacctgcaggttgacacctcagattgacacctctcgttgacacctcgacttgacacctcctattgacacctcactttgacacctctgcttgacacctcgtattgacacctcggcgcgccatgcttcatcagactct

SEQ ID NO: 5581 - DNA, 172 bp, Artificial Sequence; identical to SEQ ID NO: 5580
  Synthetic polynucleotide

SEQ ID NO: 5582 - DNA, 172 bp, Artificial Sequence
  Synthetic polynucleotide
atcatctcaccttgcctcctgagcttagtatccattggcctgcaggaccgtttagcagaaccgtttagctcgaccgtttagcgacaccgtttagcctaaccgtttagcactaccgtttagctgcaccgtttagcgtaaccgtttagcggcgcgccatgcttcatcagactct

SEQ ID NO: 5583 - DNA, 172 bp, Artificial Sequence; identical to SEQ ID NO: 5582
  Synthetic polynucleotide

SEQ ID NO: 5584 - DNA, 180 bp, Artificial Sequence
  Synthetic polynucleotide
atcatctcaccttgcctcctgacgaagacagcaggagacctgcaggtgattaaattaagatgattaaattatcgtgattaaattagactgattaaattactatgattaaattaacttgattaaattatgctgattaaattagtatgattaaattaggcgcgccatgcttcatcagactct

SEQ ID NO: 5585 - DNA, 180 bp, Artificial Sequence; identical to SEQ ID NO: 5584
  Synthetic polynucleotide

SEQ ID NO: 5586 - DNA, 191 bp, Artificial Sequence
  Synthetic polynucleotide
atcatctcaccttgcctcctgagtccgacgatatgaggcctgcaggtttcacttcctctttttagatttcacttcctcttttttcgtttcacttcctctttttgactttcacttcctctttttctatttcacttcctctttttacttttcacttcctcttttttgcggcgcgccatgcttcatcagactct

SEQ ID NO: 5587 - DNA, 191 bp, Artificial Sequence; identical to SEQ ID NO: 5586
  Synthetic polynucleotide

SEQ ID NO: 5588 - DNA, 180 bp, Artificial Sequence
  Synthetic polynucleotide
atcatctcaccttgcctcctgagcgccgttcttagaatcctgcaggggaccacccagagaggaccacccagtcgggaccacccaggacggaccacccagctaggaccacccagactggaccacccagtgcggaccacccaggtaggaccacccagggcgcgccatgcttcatcagactct

SEQ ID NO: 5589 - DNA, 180 bp, Artificial Sequence; identical to SEQ ID NO: 5588
  Synthetic polynucleotide

SEQ ID NO: 5590 - DNA, 191 bp, Artificial Sequence
  Synthetic polynucleotide
atcatctcaccttgcctcctgttatcgctgtaggcctgcctgcagggagtattatgggatggaagagagtattatgggatggatcggagtattatgggatggagacgagtattatgggatggactagagtattatgggatggaactgagtattatgggatggatgcggcgcgccatgcttcatcagactct

SEQ ID NO: 5591 - DNA, 191 bp, Artificial Sequence; identical to SEQ ID NO: 5590
  Synthetic polynucleotide

SEQ ID NO: 5592 - DNA, 156 bp, Artificial Sequence
  Synthetic polynucleotide
atcatctcaccttgcctcctgtacgagattgggtttgacctgcaggctgataagagactgataagtcgctgataaggacctgataagctactgataagactctgataagtgcctgataaggtactgataagggcgcgccatgcttcatcagactct

SEQ ID NO: 5593 - DNA, 156 bp, Artificial Sequence; identical to SEQ ID NO: 5592
  Synthetic polynucleotide

SEQ ID NO: 5594 - DNA, 185 bp, Artificial Sequence
  Synthetic polynucleotide
atcatctcaccttgcctcctggcaactattggagaattcctgcaggtatcttatcttatcttagatatcttatcttatctttcgtatcttatcttatcttgactatcttatcttatcttctatatcttatcttatcttacttatcttatcttatctttgcggcgcgccatgcttcatcagactct

SEQ ID NO: 5595 - DNA, 185 bp, Artificial Sequence; identical to SEQ ID NO: 5594
  Synthetic polynucleotide

SEQ ID NO: 5596 - DNA, 191 bp, Artificial Sequence
  Synthetic polynucleotide
atcatctcaccttgcctcctgtcgccacattgtttctgcctgcaggtatcaatgttattgataagatatcaatgttattgatatcgtatcaatgttattgatagactatcaatgttattgatactatatcaatgttattgataacttatcaatgttattgatatgcggcgcgccatgcttcatcagactct

SEQ ID NO: 5597 - DNA, 191 bp, Artificial Sequence; identical to SEQ ID NO: 5596
  Synthetic polynucleotide

SEQ ID NO: 5598 - DNA, 180 bp, Artificial Sequence
  Synthetic polynucleotide
atcatctcaccttgcctcctgctagtcagtcgggcatgcctgcaggacagctgctgcagaacagctgctgctcgacagctgctgcgacacagctgctgcctaacagctgctgcactacagctgctgctgcacagctgctgcgtaacagctgctgcggcgcgccatgcttcatcagactct

SEQ ID NO: 5599 - DNA, 180 bp, Artificial Sequence; identical to SEQ ID NO: 5598
  Synthetic polynucleotide

SEQ ID NO: 5600 - DNA, 180 bp, Artificial Sequence
  Synthetic polynucleotide
atcatctcaccttgcctcctgagctaacacccaagtttcctgcaggttgaccttgaaagattgaccttgaatcgttgaccttgaagacttgaccttgaactattgaccttgaaactttgaccttgaatgcttgaccttgaagtattgaccttgaaggcgcgccatgcttcatcagactct

SEQ ID NO: 5601 - DNA, 180 bp, Artificial Sequence; identical to SEQ ID NO: 5600
  Synthetic polynucleotide

SEQ ID NO: 5602 - DNA, 191 bp, Artificial Sequence
  Synthetic polynucleotide
atcatctcaccttgcctcctgtgtgggtgtcgtccagacctgcaggttttactttcactttcactttagattttactttcactttcacttttcgttttactttcactttcactttgacttttactttcactttcactttctattttactttcactttcactttactggcgcgccatgcttcatcagactct

SEQ ID NO: 5603 - DNA, 191 bp, Artificial Sequence; identical to SEQ ID NO: 5602
  Synthetic polynucleotide

SEQ ID NO: 5604 - DNA, 172 bp, Artificial Sequence
  Synthetic polynucleotide
atcatctcaccttgcctcctgagaacgtatagggaagccctgcaggcacgcacgcaagacacgcacgcatcgcacgcacgcagaccacgcacgcactacacgcacgcaactcacgcacgcatgccacgcacgcagtacacgcacgcaggcgcgccatgcttcatcagactct

SEQ ID NO: 5605 - DNA, 172 bp, Artificial Sequence; identical to SEQ ID NO: 5604
  Synthetic polynucleotide

SEQ ID NO: 5606 - DNA, 156 bp, Artificial Sequence
  Synthetic polynucleotide
atcatctcaccttgcctcctggaacaatcggagaagtccctgcaggaccacaaaagaaccacaaatcgaccacaaagacaccacaaactaaccacaaaactaccacaaatgcaccacaaagtaaccacaaaggcgcgccatgcttcatcagactct

SEQ ID NO: 5607 - DNA, 156 bp, Artificial Sequence; identical to SEQ ID NO: 5606
  Synthetic polynucleotide

SEQ ID NO: 5608 - DNA, 188 bp, Artificial Sequence
  Synthetic polynucleotide
atcatctcaccttgcctcctgcgtcgatcgaaaggtttcctgcaggaaattgacctcaagaaaattgacctcatcgaaattgacctcagacaaattgacctcactaaaattgacctcaactaaattgacctcatgcaaattgacctcagtaaaattgacctcaggcgcgccatgcttcatcagactct

SEQ ID NO: 5609 - DNA, 188 bp, Artificial Sequence; identical to SEQ ID NO: 5608
  Synthetic polynucleotide

SEQ ID NO: 5610 - DNA, 172 bp, Artificial Sequence
  Synthetic polynucleotide
atcatctcaccttgcctcctggaggaaagtactccttccctgcaggataatgcataagaataatgcatatcgataatgcatagacataatgcatactaataatgcataactataatgcatatgcataatgcatagtaataatgcataggcgcgccatgcttcatcagactct

SEQ ID NO: 5611 - DNA, 172 bp, Artificial Sequence; identical to SEQ ID NO: 5610
  Synthetic polynucleotide

SEQ ID NO: 5612 - DNA, 186 bp, Artificial Sequence
  Synthetic polynucleotide
atcatctcaccttgcctcctgtccctacgcgttcatcacctgcaggccccggccccgcccccccccagaccccggccccgccccccccctcgccccggccccgcccccccccgacccccggccccgcccccccccctaccccggccccgcccccccccactggcgcgccatgcttcatcagactct

SEQ ID NO: 5613 - DNA, 186 bp, Artificial Sequence; identical to SEQ ID NO: 5612
  Synthetic polynucleotide

SEQ ID NO: 5614 - DNA, 190 bp, Artificial Sequence
  Synthetic polynucleotide
atcatctcaccttgcctcctgagaatcacaccaaagtacctgcagggattgcatcatcctagagattgcatcatccttcggattgcatcatcctgacgattgcatcatcctctagattgcatcatcctactgattgcatcatccttgcgattgcatcatcctgtaggcgcgccatgcttcatcagactct

SEQ ID NO: 5615 - DNA, 190 bp, Artificial Sequence; identical to SEQ ID NO: 5614
  Synthetic polynucleotide

SEQ ID NO: 5616 - DNA, 188 bp, Artificial Sequence
  Synthetic polynucleotide
atcatctcaccttgcctcctgtgcacggaagtcgctcacctgcaggtaatgacacgtcagataatgacacgtctcgtaatgacacgtcgactaatgacacgtcctataatgacacgtcacttaatgacacgtctgctaatgacacgtcgtataatgacacgtcggcgcgccatgcttcatcagactct

SEQ ID NO: 5617 - DNA, 188 bp, Artificial Sequence; identical to SEQ ID NO: 5616
  Synthetic polynucleotide

SEQ ID NO: 5618 - DNA, 196 bp, Artificial Sequence
  Synthetic polynucleotide
atcatctcaccttgcctcctgtctcgatcgaataaagacctgcaggggtcaaagttcatagaggtcaaagttcattcgggtcaaagttcatgacggtcaaagttcatctaggtcaaagttcatactggtcaaagttcattgcggtcaaagttcatgtaggtcaaagttcatggcgcgccatgcttcatcagactct

SEQ ID NO: 5619 - DNA, 196 bp, Artificial Sequence; identical to SEQ ID NO: 5618
  Synthetic polynucleotide

SEQ ID NO: 5620 - DNA, 197 bp, Artificial Sequence
  Synthetic polynucleotide
atcatctcaccttgcctcctggagtcacttatctccatcctgcaggcaggcgccgccgccgagacaggcgccgccgccgtcgcaggcgccgccgccggaccaggcgccgccgccgctacaggcgccgccgccgactcaggcgccgccgccgtgccaggcgccgccgccggtaggcgcgccatgcttcatcagactct

SEQ ID NO: 5621 - DNA, 197 bp, Artificial Sequence; identical to SEQ ID NO: 5620
  Synthetic polynucleotide

SEQ ID NO: 5622 - DNA, 200 bp, Artificial Sequence
  Synthetic polynucleotide
atcatctcaccttgcctcctgcatagcgtcttcctgtacctgcaggctggtgggggcagataaggagactggtgggggcagataaggtcgctggtgggggcagataagggacctggtgggggcagataaggctactggtgggggcagataaggactctggtgggggcagataaggggcgcgccatgcttcatcagactct

SEQ ID NO: 5623 - DNA, 200 bp, Artificial Sequence; identical to SEQ ID NO: 5622
  Synthetic polynucleotide

SEQ ID NO: 5624 - DNA, 156 bp, Artificial Sequence
  Synthetic polynucleotide
atcatctcaccttgcctcctgagcacgtacgtattcctcctgcagggggagcacagagggagcactcggggagcacgacgggagcacctagggagcacactgggagcactgcgggagcacgtagggagcacggcgcgccatgcttcatcagactct

SEQ ID NO: 5625 - DNA, 156 bp, Artificial Sequence; identical to SEQ ID NO: 5624
  Synthetic polynucleotide

SEQ ID NO: 5626 - DNA, 156 bp, Artificial Sequence
  Synthetic polynucleotide
atcatctcaccttgcctcctggcagctaagtcgatctgcctgcaggaaaggggcagaaaaggggctcgaaaggggcgacaaaggggcctaaaaggggcactaaaggggctgcaaaggggcgtaaaaggggcggcgcgccatgcttcatcagactct

SEQ ID NO: 5627 - DNA, 156 bp, Artificial Sequence; identical to SEQ ID NO: 5626
  Synthetic polynucleotide

SEQ ID NO: 5628 - DNA, 156 bp, Artificial Sequence
  Synthetic polynucleotide
atcatctcaccttgcctcctggcgatagctggtagtcacctgcaggataattatagaataattattcgataattatgacataattatctaataattatactataattattgcataattatgtaataattatggcgcgccatgcttcatcagactct

SEQ ID NO: 5629 - DNA, 156 bp, Artificial Sequence; identical to SEQ ID NO: 5628
  Synthetic polynucleotide

SEQ ID NO: 5630 - DNA, 190 bp, Artificial Sequence
  Synthetic polynucleotide
atcatctcaccttgcctcctgagcgttagtgaatccaccctgcagggctgccatctagtgagagctgccatctagtgtcggctgccatctagtggacgctgccatctagtgctagctgccatctagtgactgctgccatctagtgtgcgctgccatctagtggtaggcgcgccatgcttcatcagactct

SEQ ID NO: 5631 - DNA, 190 bp, Artificial Sequence; identical to SEQ ID NO: 5630
  Synthetic polynucleotide

SEQ ID NO: 5632 - DNA, 188 bp, Artificial Sequence
  Synthetic polynucleotide
atcatctcaccttgcctcctgtactgcggctgtcgaaacctgcaggttgaatattcatagattgaatattcattcgttgaatattcatgacttgaatattcatctattgaatattcatactttgaatattcattgcttgaatattcatgtattgaatattcatggcgcgccatgcttcatcagactct

SEQ ID NO: 5633 - DNA, 188 bp, Artificial Sequence; identical to SEQ ID NO: 5632
  Synthetic polynucleotide

SEQ ID NO: 5634 - DNA, 191 bp, Artificial Sequence
  Synthetic polynucleotide
atcatctcaccttgcctcctggtacgggttcagtcaggcctgcagggaacaattgcagtgttcagagaacaattgcagtgttctcggaacaattgcagtgttcgacgaacaattgcagtgttcctagaacaattgcagtgttcactgaacaattgcagtgttctgcggcgcgccatgcttcatcagactct

SEQ ID NO: 5635 - DNA, 191 bp, Artificial Sequence; identical to SEQ ID NO: 5634
  Synthetic polynucleotide

SEQ ID NO: 5636 - DNA, 188 bp, Artificial Sequence
  Synthetic polynucleotide
atcatctcaccttgcctcctggcatgtttacatgcgagcctgcaggaaaaagaggaagagaaaaaagaggaagtcgaaaaagaggaaggacaaaaagaggaagctaaaaaagaggaagactaaaaagaggaagtgcaaaaagaggaaggtaaaaaagaggaagggcgcgccatgcttcatcagactct

SEQ ID NO: 5637 - DNA, 188 bp, Artificial Sequence; identical to SEQ ID NO: 5636
  Synthetic polynucleotide

SEQ ID NO: 5638 - DNA, 197 bp, Artificial Sequence
  Synthetic polynucleotide
atcatctcaccttgcctcctgtctttacgtaatggactcctgcaggtaaataaatatttcaagataaataaatatttcatcgtaaataaatatttcagactaaataaatatttcactataaataaatatttcaacttaaataaatatttcatgctaaataaatatttcagtaggcgcgccatgcttcatcagactct

SEQ ID NO: 5639 - DNA, 197 bp, Artificial Sequence; identical to SEQ ID NO: 5638
  Synthetic polynucleotide

SEQ ID NO: 5640 - DNA, 172 bp, Artificial Sequence
  Synthetic polynucleotide
atcatctcaccttgcctcctgagttgcgtcgatcggttcctgcaggttcccggaaaagattcccggaaatcgttcccggaaagacttcccggaaactattcccggaaaactttcccggaaatgcttcccggaaagtattcccggaaaggcgcgccatgcttcatcagactct

SEQ ID NO: 5641 - DNA, 172 bp, Artificial Sequence; identical to SEQ ID NO: 5640
  Synthetic polynucleotide

SEQ ID NO: 5642 - DNA, 164 bp, Artificial Sequence
  Synthetic polynucleotide
atcatctcaccttgcctcctgctctgggttaaagctgacctgcaggagctgtcaaagaagctgtcaatcgagctgtcaagacagctgtcaactaagctgtcaaactagctgtcaatgcagctgtcaagtaagctgtcaaggcgcgccatgcttcatcagactct

SEQ ID NO: 5643 - DNA, 164 bp, Artificial Sequence; identical to SEQ ID NO: 5642
  Synthetic polynucleotide

SEQ ID NO: 5644 - DNA, 196 bp, Artificial Sequence
  Synthetic polynucleotide
atcatctcaccttgcctcctgttgaccgtcgcgagtctcctgcaggaaacccggaagtaagaaaacccggaagtatcgaaacccggaagtagacaaacccggaagtactaaaacccggaagtaactaaacccggaagtatgcaaacccggaagtagtaaaacccggaagtaggcgcgccatgcttcatcagactct

SEQ ID NO: 5645 - DNA, 196 bp, Artificial Sequence; identical to SEQ ID NO: 5644
  Synthetic polynucleotide

SEQ ID NO: 5646 - DNA, 197 bp, Artificial Sequence
  Synthetic polynucleotide
atcatctcaccttgcctcctgactctgaggacgcttgacctgcaggagcatgactcatcgtagaagcatgactcatcgttcgagcatgactcatcgtgacagcatgactcatcgtctaagcatgactcatcgtactagcatgactcatcgttgcagcatgactcatcgtgtaggcgcgccatgcttcatcagactct

SEQ ID NO: 5647 - DNA, 197 bp, Artificial Sequence; identical to SEQ ID NO: 5646
  Synthetic polynucleotide

SEQ ID NO: 5648 - DNA, 164 bp, Artificial Sequence
  Synthetic polynucleotide
atcatctcaccttgcctcctgacttagattgagagtaccctgcaggacagttacaagaacagttacatcgacagttacagacacagttacactaacagttacaactacagttacatgcacagttacagtaacagttacaggcgcgccatgcttcatcagactct

SEQ ID NO: 5649 - DNA, 164 bp, Artificial Sequence; identical to SEQ ID NO: 5648
  Synthetic polynucleotide

SEQ ID NO: 5650 - DNA, 172 bp, Artificial Sequence
  Synthetic polynucleotide
atcatctcaccttgcctcctgcatcgatccggctctaccctgcaggaaggggcgggagaaaggggcgggtcgaaggggcggggacaaggggcgggctaaaggggcgggactaaggggcgggtgcaaggggcggggtaaaggggcgggggcgcgccatgcttcatcagactct

SEQ ID NO: 5651 - DNA, 172 bp, Artificial Sequence; identical to SEQ ID NO: 5650
  Synthetic polynucleotide

SEQ ID NO: 5652 - DNA, 164 bp, Artificial Sequence
  Synthetic polynucleotide
atcatctcaccttgcctcctgtcgttgaactggctgtgcctgcaggttgacctctagattgacctcttcgttgacctctgacttgacctctctattgacctctactttgacctcttgcttgacctctgtattgacctctggcgcgccatgcttcatcagactct

SEQ ID NO: 5653 - DNA, 164 bp, Artificial Sequence; identical to SEQ ID NO: 5652
  Synthetic polynucleotide

SEQ ID NO: 5654 - DNA, 164 bp, Artificial Sequence
  Synthetic polynucleotide
atcatctcaccttgcctcctgtgcgtggttctacgacacctgcaggctaattggtagactaattggttcgctaattggtgacctaattggtctactaattggtactctaattggttgcctaattggtgtactaattggtggcgcgccatgcttcatcagactct

SEQ ID NO: 5655 - DNA, 164 bp, Artificial Sequence; identical to SEQ ID NO: 5654
  Synthetic polynucleotide

SEQ ID NO: 5656 - DNA, 196 bp, Artificial Sequence
  Synthetic polynucleotide
atcatctcaccttgcctcctgacaagcgtctctatttccctgcaggcgctgccctctgcagacgctgccctctgctcgcgctgccctctgcgaccgctgccctctgcctacgctgccctctgcactcgctgccctctgctgccgctgccctctgcgtacgctgccctctgcggcgcgccatgcttcatcagactct

SEQ ID NO: 5657 - DNA, 196 bp, Artificial Sequence; identical to SEQ ID NO: 5656
  Synthetic polynucleotide

SEQ ID NO: 5658 - DNA, 197 bp, Artificial Sequence
  Synthetic polynucleotide
atcatctcaccttgcctcctgccaccactccatgctaacctgcaggcatttcccggaaatgagacatttcccggaaatgtcgcatttcccggaaatggaccatttcccggaaatgctacatttcccggaaatgactcatttcccggaaatgtgccatttcccggaaatggtaggcgcgccatgcttcatcagactct

SEQ ID NO: 5659 - DNA, 197 bp, Artificial Sequence; identical to SEQ ID NO: 5658
  Synthetic polynucleotide

SEQ ID NO: 5660 - DNA, 197 bp, Artificial Sequence
  Synthetic polynucleotide
atcatctcaccttgcctcctgtacaagaggccgtcccacctgcaggagggtcaaaaggtcaagaagggtcaaaaggtcatcgagggtcaaaaggtcagacagggtcaaaaggtcactaagggtcaaaaggtcaactagggtcaaaaggtcatgcagggtcaaaaggtcagtaggcgcgccatgcttcatcagactct

SEQ ID NO: 5661 - DNA, 197 bp, Artificial Sequence; identical to SEQ ID NO: 5660
  Synthetic polynucleotide

SEQ ID NO: 5662 - DNA, 191 bp, Artificial Sequence
  Synthetic polynucleotide
atcatctcaccttgcctcctggaagtttaagtagtgtgcctgcaggtgtttacacttgtttatagatgtttacacttgtttattcgtgtttacacttgtttatgactgtttacacttgtttatctatgtttacacttgtttatacttgtttacacttgtttattgcggcgcgccatgcttcatcagactct

SEQ ID NO: 5663 - DNA, 191 bp, Artificial Sequence; identical to SEQ ID NO: 5662
  Synthetic polynucleotide

SEQ ID NO: 5664 - DNA, 172 bp, Artificial Sequence
  Synthetic polynucleotide
atcatctcaccttgcctcctggtacgctgggtaaaccacctgcaggtttcactttcagatttcactttctcgtttcactttcgactttcactttcctatttcactttcacttttcactttctgctttcactttcgtatttcactttcggcgcgccatgcttcatcagactct

SEQ ID NO: 5665 - DNA, 172 bp, Artificial Sequence; identical to SEQ ID NO: 5664
  Synthetic polynucleotide

SEQ ID NO: 5666 - DNA, 197 bp, Artificial Sequence
  Synthetic polynucleotide
atcatctcaccttgcctcctgagcagagcccttacaagcctgcaggatgagtcatccctttagaatgagtcatcccttttcgatgagtcatccctttgacatgagtcatccctttctaatgagtcatccctttactatgagtcatcccttttgcatgagtcatccctttgtaggcgcgccatgcttcatcagactct

SEQ ID NO: 5667 - DNA, 197 bp, Artificial Sequence; identical to SEQ ID NO: 5666
  Synthetic polynucleotide

SEQ ID NO: 5668 - DNA, 140 bp, Artificial Sequence
  Synthetic polynucleotide
atcatctcaccttgcctcctggtgatgaatgttctgctcctgcaggcggaagagacggaagtcgcggaaggaccggaagctacggaagactcggaagtgccggaaggtacggaagggcgcgccatgcttcatcagactct

SEQ ID NO: 5669 - DNA, 140 bp, Artificial Sequence; identical to SEQ ID NO: 5668
  Synthetic polynucleotide

SEQ ID NO: 5670 - DNA, 172 bp, Artificial Sequence
  Synthetic polynucleotide
atcatctcaccttgcctcctgaagggccttgatagtggcctgcaggtttgtttatgagatttgtttatgtcgtttgtttatggactttgtttatgctatttgtttatgacttttgtttatgtgctttgtttatggtatttgtttatgggcgcgccatgcttcatcagactct

SEQ ID NO: 5671 - DNA, 172 bp, Artificial Sequence; identical to SEQ ID NO: 5670
  Synthetic polynucleotide

SEQ ID NO: 5672 - DNA, 190 bp, Artificial Sequence
  Synthetic polynucleotide
atcatctcaccttgcctcctgagacgcgaatggttcgtcctgcaggccaccagggggcgcagaccaccagggggcgctcgccaccagggggcgcgacccaccagggggcgcctaccaccagggggcgcactccaccagggggcgctgcccaccagggggcgcgtaggcgcgccatgcttcatcagactct

SEQ ID NO: 5673 - DNA, 190 bp, Artificial Sequence; identical to SEQ ID NO: 5672
  Synthetic polynucleotide

SEQ ID NO: 5674 - DNA, 185 bp, Artificial Sequence
  Synthetic polynucleotide
atcatctcaccttgcctcctgacctctttgcctagactcctgcaggtgaactcaatgaactcagatgaactcaatgaactctcgtgaactcaatgaactcgactgaactcaatgaactcctatgaactcaatgaactcacttgaactcaatgaactctgcggcgcgccatgcttcatcagactct

SEQ ID NO: 5675 - DNA, 185 bp, Artificial Sequence; identical to SEQ ID NO: 5674
  Synthetic polynucleotide

SEQ ID NO: 5676 - DNA, 172 bp, Artificial Sequence
  Synthetic polynucleotide
atcatctcaccttgcctcctggattcactattaagctgcctgcaggtgggtggggcagatgggtggggctcgtgggtggggcgactgggtggggcctatgggtggggcacttgggtggggctgctgggtggggcgtatgggtggggcggcgcgccatgcttcatcagactct

SEQ ID NO: 5677 - DNA, 172 bp, Artificial Sequence; identical to SEQ ID NO: 5676
  Synthetic polynucleotide

SEQ ID NO: 5678 - DNA, 164 bp, Artificial Sequence
  Synthetic polynucleotide
atcatctcaccttgcctcctgtgttcaagactcctccccctgcaggtttgggttgagatttgggttgtcgtttgggttggactttgggttgctatttgggttgacttttgggttgtgctttgggttggtatttgggttgggcgcgccatgcttcatcagactct

SEQ ID NO: 5679 - DNA, 164 bp, Artificial Sequence; identical to SEQ ID NO: 5678
  Synthetic polynucleotide

SEQ ID NO: 5680 - DNA, 164 bp, Artificial Sequence
  Synthetic polynucleotide
atcatctcaccttgcctcctgtgcttgcggctcttggtcctgcaggacatctgtcagaacatctgtctcgacatctgtcgacacatctgtcctaacatctgtcactacatctgtctgcacatctgtcgtaacatctgtcggcgcgccatgcttcatcagactct

SEQ ID NO: 5681 - DNA, 164 bp, Artificial Sequence; identical to SEQ ID NO: 5680
  Synthetic polynucleotide

SEQ ID NO: 5682 - DNA, 191 bp, Artificial Sequence
  Synthetic polynucleotide
atcatctcaccttgcctcctgacatgaccggagccctacctgcaggtagtgccccctagtggccaaaagatagtgccccctagtggccaaatcgtagtgccccctagtggccaaagactagtgccccctagtggccaaactatagtgccccctagtggccaaaactggcgcgccatgcttcatcagactct

SEQ ID NO: 5683 - DNA, 191 bp, Artificial Sequence; identical to SEQ ID NO: 5682
  Synthetic polynucleotide

SEQ ID NO: 5684 - DNA, 140 bp, Artificial Sequence
  Synthetic polynucleotide
atcatctcaccttgcctcctgatcatggacgcacatttcctgcaggtaattaagataattatcgtaattagactaattactataattaacttaattatgctaattagtataattaggcgcgccatgcttcatcagactct

SEQ ID NO: 5685 - DNA, 140 bp, Artificial Sequence; identical to SEQ ID NO: 5684
  Synthetic polynucleotide

SEQ ID NO: 5686 - DNA, 190 bp, Artificial Sequence
  Synthetic polynucleotide
atcatctcaccttgcctcctgactttcgagggatagaacctgcagggttaatcattaaccagagttaatcattaacctcggttaatcattaaccgacgttaatcattaaccctagttaatcattaaccactgttaatcattaacctgcgttaatcattaaccgtaggcgcgccatgcttcatcagactct

SEQ ID NO: 5687 - DNA, 190 bp, Artificial Sequence; identical to SEQ ID NO: 5686
  Synthetic polynucleotide

SEQ ID NO: 5688 - DNA, 172 bp, Artificial Sequence
  Synthetic polynucleotide
atcatctcaccttgcctcctgaccacgaacaaggccgacctgcaggttgaccgttaagattgaccgttatcgttgaccgttagacttgaccgttactattgaccgttaactttgaccgttatgcttgaccgttagtattgaccgttaggcgcgccatgcttcatcagactct

SEQ ID NO: 5689 - DNA, 172 bp, Artificial Sequence; identical to SEQ ID NO: 5688
  Synthetic polynucleotide

SEQ ID NO: 5690 - DNA, 156 bp, Artificial Sequence
  Synthetic polynucleotide
atcatctcaccttgcctcctgagtttgaagcgtaccttcctgcaggattgttctagaattgttcttcgattgttctgacattgttctctaattgttctactattgttcttgcattgttctgtaattgttctggcgcgccatgcttcatcagactct

SEQ ID NO: 5691 - DNA, 156 bp, Artificial Sequence; identical to SEQ ID NO: 5690
  Synthetic polynucleotide

SEQ ID NO: 5692 - DNA, 172 bp, Artificial Sequence
  Synthetic polynucleotide
atcatctcaccttgcctcctgctgttaaacggtgggtccctgcagggaggtcatgcagagaggtcatgctcggaggtcatgcgacgaggtcatgcctagaggtcatgcactgaggtcatgctgcgaggtcatgcgtagaggtcatgcggcgcgccatgcttcatcagactct

SEQ ID NO: 5693 - DNA, 172 bp, Artificial Sequence; identical to SEQ ID NO: 5692
  Synthetic polynucleotide

SEQ ID NO: 5694 - DNA, 191 bp, Artificial Sequence
  Synthetic polynucleotide
atcatctcaccttgcctcctgagcgggtcacaaagtgtcctgcaggcgtcacgcatgactgcaagacgtcacgcatgactgcatcgcgtcacgcatgactgcagaccgtcacgcatgactgcactacgtcacgcatgactgcaactcgtcacgcatgactgcatgcggcgcgccatgcttcatcagactct

SEQ ID NO: 5695 - DNA, 191 bp, Artificial Sequence; identical to SEQ ID NO: 5694
  Synthetic polynucleotide

SEQ ID NO: 5696 - DNA, 191 bp, Artificial Sequence
  Synthetic polynucleotide
atcatctcaccttgcctcctggcggtactcagtatctccctgcagggccaccagatggcactaagagccaccagatggcactatcggccaccagatggcactagacgccaccagatggcactactagccaccagatggcactaactgccaccagatggcactatgcggcgcgccatgcttcatcagactct

SEQ ID NO: 5697 - DNA, 191 bp, Artificial Sequence; identical to SEQ ID NO: 5696
  Synthetic polynucleotide

SEQ ID NO: 5698 - DNA, 197 bp, Artificial Sequence
  Synthetic polynucleotide
atcatctcaccttgcctcctgtctgtgcctaaggcgaacctgcaggtttccataatggaaaagatttccataatggaaatcgtttccataatggaaagactttccataatggaaactatttccataatggaaaacttttccataatggaaatgctttccataatggaaagtaggcgcgccatgcttcatcagactct

SEQ ID NO: 5699 - DNA, 197 bp, Artificial Sequence; identical to SEQ ID NO: 5698
  Synthetic polynucleotide

SEQ ID NO: 5700 - DNA, 190 bp, Artificial Sequence
  Synthetic polynucleotide
atcatctcaccttgcctcctggtacctattgtacctagcctgcaggaaagatcaaaggaaagaaaagatcaaaggaatcgaaagatcaaaggaagacaaagatcaaaggaactaaaagatcaaaggaaactaaagatcaaaggaatgcaaagatcaaaggaagtaggcgcgccatgcttcatcagactct

SEQ ID NO: 5701 - DNA, 190 bp, Artificial Sequence; identical to SEQ ID NO: 5700
  Synthetic polynucleotide

SEQ ID NO: 5702 - DNA, 164 bp, Artificial Sequence
  Synthetic polynucleotide
atcatctcaccttgcctcctggttgggccaataacggccctgcaggatcagctggagaatcagctggtcgatcagctgggacatcagctggctaatcagctggactatcagctggtgcatcagctgggtaatcagctggggcgcgccatgcttcatcagactct

SEQ ID NO: 5703 - DNA, 164 bp, Artificial Sequence; identical to SEQ ID NO: 5702
  Synthetic polynucleotide

SEQ ID NO: 5704 - DNA, 172 bp, Artificial Sequence
  Synthetic polynucleotide
atcatctcaccttgcctcctgccactaattgtcagcctcctgcaggattaattaatagaattaattaattcgattaattaatgacattaattaatctaattaattaatactattaattaattgcattaattaatgtaattaattaatggcgcgccatgcttcatcagactct

SEQ ID NO: 5705 - DNA, 172 bp, Artificial Sequence; identical to SEQ ID NO: 5704
  Synthetic polynucleotide

SEQ ID NO: 5706 - DNA, 172 bp, Artificial Sequence
  Synthetic polynucleotide
atcatctcaccttgcctcctgatgaataaatgtcggaccctgcaggagcacttgagagaagcacttgagtcgagcacttgaggacagcacttgagctaagcacttgagactagcacttgagtgcagcacttgaggtaagcacttgagggcgcgccatgcttcatcagactct

SEQ ID NO: 5707 - DNA, 172 bp, Artificial Sequence; identical to SEQ ID NO: 5706
  Synthetic polynucleotide

SEQ ID NO: 5708 - DNA, 164 bp, Artificial Sequence
  Synthetic polynucleotide
atcatctcaccttgcctcctgacgaaattcactgccctcctgcaggaatttgtttagaaatttgttttcgaatttgtttgacaatttgtttctaaatttgtttactaatttgttttgcaatttgtttgtaaatttgtttggcgcgccatgcttcatcagactct

SEQ ID NO: 5709 - DNA, 164 bp, Artificial Sequence; identical to SEQ ID NO: 5708
  Synthetic polynucleotide

SEQ ID NO: 5710 - DNA, 172 bp, Artificial Sequence
  Synthetic polynucleotide
atcatctcaccttgcctcctggtcttgcaacgttaatgcctgcaggcggggggcccagacggggggccctcgcggggggcccgaccggggggcccctacggggggcccactcggggggccctgccggggggcccgtacggggggcccggcgcgccatgcttcatcagactct

SEQ ID NO: 5711 - DNA, 172 bp, Artificial Sequence; identical to SEQ ID NO: 5710
  Synthetic polynucleotide

SEQ ID NO: 5712 - DNA, 188 bp, Artificial Sequence
  Synthetic polynucleotide
atcatctcaccttgcctcctgcgcctgaaataggtagacctgcaggaatatgcaaattagaaatatgcaaatttcgaatatgcaaattgacaatatgcaaattctaaatatgcaaattactaatatgcaaatttgcaatatgcaaattgtaaatatgcaaattggcgcgccatgcttcatcagactct

SEQ ID NO: 5713 - DNA, 188 bp, Artificial Sequence; identical to SEQ ID NO: 5712
  Synthetic polynucleotide

SEQ ID NO: 5714 - DNA, 191 bp, Artificial Sequence
  Synthetic polynucleotide
atcatctcaccttgcctcctgttctcctcgttcccatgcctgcaggattaaggggtcacgacaagaattaaggggtcacgacatcgattaaggggtcacgacagacattaaggggtcacgacactaattaaggggtcacgacaactattaaggggtcacgacatgcggcgcgccatgcttcatcagactct

SEQ ID NO: 5715 - DNA, 191 bp, Artificial Sequence; identical to SEQ ID NO: 5714
  Synthetic polynucleotide

SEQ ID NO: 5716 - DNA, 180 bp, Artificial Sequence
  Synthetic polynucleotide
atcatctcaccttgcctcctgtcgcatctatgccctcgcctgcaggccacttccggcagaccacttccggctcgccacttccggcgacccacttccggcctaccacttccggcactccacttccggctgcccacttccggcgtaccacttccggcggcgcgccatgcttcatcagactct

SEQ ID NO: 5717 - DNA, 180 bp, Artificial Sequence; identical to SEQ ID NO: 5716
  Synthetic polynucleotide

SEQ ID NO: 5718 - DNA, 190 bp, Artificial Sequence
  Synthetic polynucleotide
atcatctcaccttgcctcctggtttcctcaccgcgaaacctgcaggcatgaatattcataagacatgaatattcatatcgcatgaatattcatagaccatgaatattcatactacatgaatattcataactcatgaatattcatatgccatgaatattcatagtaggcgcgccatgcttcatcagactct

SEQ ID NO: 5719 - DNA, 190 bp, Artificial Sequence; identical to SEQ ID NO: 5718
  Synthetic polynucleotide

SEQ ID NO: 5720 - DNA, 164 bp, Artificial Sequence
  Synthetic polynucleotide
atcatctcaccttgcctcctgatcttaattcactctcccctgcaggatcagctgaagaatcagctgatcgatcagctgagacatcagctgactaatcagctgaactatcagctgatgcatcagctgagtaatcagctgaggcgcgccatgcttcatcagactct

SEQ ID NO: 5721 - DNA, 164 bp, Artificial Sequence; identical to SEQ ID NO: 5720
  Synthetic polynucleotide

SEQ ID NO: 5722 - DNA, 197 bp, Artificial Sequence
  Synthetic polynucleotide
atcatctcaccttgcctcctgtaacgagcatagcccagcctgcaggatgaatgaaattcatagaatgaatgaaattcattcgatgaatgaaattcatgacatgaatgaaattcatctaatgaatgaaattcatactatgaatgaaattcattgcatgaatgaaattcatgtaggcgcgccatgcttcatcagactct

SEQ ID NO: 5723 - DNA, 197 bp, Artificial Sequence; identical to SEQ ID NO: 5722
  Synthetic polynucleotide

SEQ ID NO: 5724 - DNA, 197 bp, Artificial Sequence
  Synthetic polynucleotide
atcatctcaccttgcctcctgtctatcacaacgggtaccctgcaggcttatctgccccccccagagacttatctgccccccccagtcgcttatctgccccccccaggaccttatctgccccccccagctacttatctgccccccccagactcttatctgccccccccagtgcggcgcgccatgcttcatcagactct

SEQ ID NO: 5725 - DNA, 197 bp, Artificial Sequence; identical to SEQ ID NO: 5724
  Synthetic polynucleotide

SEQ ID NO: 5726 - DNA, 140 bp, Artificial Sequence
  Synthetic polynucleotide
atcatctcaccttgcctcctgtgaacgttacggtcgtccctgcaggtaattgagataattgtcgtaattggactaattgctataattgacttaattgtgctaattggtataattgggcgcgccatgcttcatcagactct

SEQ ID NO: 5727 - DNA, 140 bp, Artificial Sequence; identical to SEQ ID NO: 5726
  Synthetic polynucleotide

SEQ ID NO: 5728 - DNA, 197 bp, Artificial Sequence
  Synthetic polynucleotide
atcatctcaccttgcctcctggactggagtcgttccttcctgcaggtgctatttttggcatagatgctatttttggcattcgtgctatttttggcatgactgctatttttggcatctatgctatttttggcatacttgctatttttggcattgctgctatttttggcatgtaggcgcgccatgcttcatcagactct

SEQ ID NO: 5729 - DNA, 197 bp, Artificial Sequence; identical to SEQ ID NO: 5728
  Synthetic polynucleotide

SEQ ID NO: 5730 - DNA, 197 bp, Artificial Sequence
  Synthetic polynucleotide
atcatctcaccttgcctcctgagtcgcgagagatataccctgcaggcaaggtcacggtgacctgagacaaggtcacggtgacctgtcgcaaggtcacggtgacctggaccaaggtcacggtgacctgctacaaggtcacggtgacctgactcaaggtcacggtgacctgtgcggcgcgccatgcttcatcagactct

SEQ ID NO: 5731 - DNA, 197 bp, Artificial Sequence; identical to SEQ ID NO: 5730
  Synthetic polynucleotide

SEQ ID NO: 5732 - DNA, 164 bp, Artificial Sequence
  Synthetic polynucleotide
atcatctcaccttgcctcctgtccacctgcacagatggcctgcaggcgaccgttaagacgaccgttatcgcgaccgttagaccgaccgttactacgaccgttaactcgaccgttatgccgaccgttagtacgaccgttaggcgcgccatgcttcatcagactct

SEQ ID NO: 5733 - DNA, 164 bp, Artificial Sequence; identical to SEQ ID NO: 5732
  Synthetic polynucleotide

SEQ ID NO: 5734 - DNA, 188 bp, Artificial Sequence
  Synthetic polynucleotide
atcatctcaccttgcctcctgacattgacttgtcacctcctgcaggcaccagggggcgagacaccagggggcgtcgcaccagggggcggaccaccagggggcgctacaccagggggcgactcaccagggggcgtgccaccagggggcggtacaccagggggcgggcgcgccatgcttcatcagactct

SEQ ID NO: 5735 - DNA, 188 bp, Artificial Sequence; identical to SEQ ID NO: 5734
  Synthetic polynucleotide

SEQ ID NO: 5736 - DNA, 191 bp, Artificial Sequence
  Synthetic polynucleotide
atcatctcaccttgcctcctgtagtactatagagcaggcctgcaggtcgcattaattaatgcaagatcgcattaattaatgcatcgtcgcattaattaatgcagactcgcattaattaatgcactatcgcattaattaatgcaacttcgcattaattaatgcatgcggcgcgccatgcttcatcagactct

SEQ ID NO: 5737 - DNA, 191 bp, Artificial Sequence; identical to SEQ ID NO: 5736
  Synthetic polynucleotide

SEQ ID NO: 5738 - DNA, 190 bp, Artificial Sequence
  Synthetic polynucleotide
atcatctcaccttgcctcctgttacagtgttgccttatcctgcaggggccacgcccccttagaggccacgccccctttcgggccacgcccccttgacggccacgcccccttctaggccacgcccccttactggccacgccccctttgcggccacgcccccttgtaggcgcgccatgcttcatcagactct

SEQ ID NO: 5739 - DNA, 190 bp, Artificial Sequence; identical to SEQ ID NO: 5738
  Synthetic polynucleotide

SEQ ID NO: 5740 - DNA, 191 bp, Artificial Sequence
  Synthetic polynucleotide
atcatctcaccttgcctcctgagcaacgcactactcgccctgcaggttttattaattaatttgagattttattaattaatttgtcgttttattaattaatttggacttttattaattaatttgctattttattaattaatttgactttttattaattaatttgtgcggcgcgccatgcttcatcagactct

SEQ ID NO: 5741 - DNA, 191 bp, Artificial Sequence; identical to SEQ ID NO: 5740
  Synthetic polynucleotide

SEQ ID NO: 5742 - DNA, 180 bp, Artificial Sequence
  Synthetic polynucleotide
atcatctcaccttgcctcctggaggagagattcctatacctgcaggagataaggcctagaagataaggccttcgagataaggcctgacagataaggcctctaagataaggcctactagataaggccttgcagataaggcctgtaagataaggcctggcgcgccatgcttcatcagactct

SEQ ID NO: 5743 - DNA, 180 bp, Artificial Sequence; identical to SEQ ID NO: 5742
  Synthetic polynucleotide

SEQ ID NO: 5744 - DNA, 156 bp, Artificial Sequence
  Synthetic polynucleotide
atcatctcaccttgcctcctgccattgatgaagattctcctgcaggataattagagaataattagtcgataattaggacataattagctaataattagactataattagtgcataattaggtaataattagggcgcgccatgcttcatcagactct

SEQ ID NO: 5745 - DNA, 156 bp, Artificial Sequence; identical to SEQ ID NO: 5744
  Synthetic polynucleotide

SEQ ID NO: 5746 - DNA, 185 bp, Artificial Sequence
  Synthetic polynucleotide
atcatctcaccttgcctcctgctaatgacgaagtacgtcctgcaggtataactaattacttaagatataactaattacttatcgtataactaattacttagactataactaattacttactatataactaattacttaacttataactaattacttatgcggcgcgccatgcttcatcagactct

SEQ ID NO: 5747 - DNA, 185 bp, Artificial Sequence; identical to SEQ ID NO: 5746
  Synthetic polynucleotide

SEQ ID NO: 5748 - DNA, 185 bp, Artificial Sequence
  Synthetic polynucleotide
atcatctcaccttgcctcctgaccacagatttagctctcctgcaggctaggggcgcccccaaagactaggggcgcccccaatcgctaggggcgcccccaagacctaggggcgcccccaactactaggggcgcccccaaactctaggggcgcccccaatgcggcgcgccatgcttcatcagactct

SEQ ID NO: 5749 - DNA, 185 bp, Artificial Sequence; identical to SEQ ID NO: 5748
  Synthetic polynucleotide

SEQ ID NO: 5750 - DNA, 191 bp, Artificial Sequence
  Synthetic polynucleotide
atcatctcaccttgcctcctggtaacgaattctgagtgcctgcaggagtttttaattaatttgagaagtttttaattaatttgtcgagtttttaattaatttggacagtttttaattaatttgctaagtttttaattaatttgactagtttttaattaatttgtgcggcgcgccatgcttcatcagactct

SEQ ID NO: 5751 - DNA, 191 bp, Artificial Sequence; identical to SEQ ID NO: 5750
  Synthetic polynucleotide

SEQ ID NO: 5752 - DNA, 196 bp, Artificial Sequence
  Synthetic polynucleotide
atcatctcaccttgcctcctgcaatttaattgagcgcacctgcaggatgaactttgaccagaatgaactttgacctcgatgaactttgaccgacatgaactttgaccctaatgaactttgaccactatgaactttgacctgcatgaactttgaccgtaatgaactttgaccggcgcgccatgcttcatcagactct

SEQ ID NO: 5753 - DNA, 196 bp, Artificial Sequence; identical to SEQ ID NO: 5752
  Synthetic polynucleotide

SEQ ID NO: 5754 - DNA, 156 bp, Artificial Sequence
  Synthetic polynucleotide
atcatctcaccttgcctcctgtcgttacgcgttataagcctgcaggataattacagaataattactcgataattacgacataattacctaataattacactataattactgcataattacgtaataattacggcgcgccatgcttcatcagactct

SEQ ID NO: 5755 - DNA, 156 bp, Artificial Sequence; identical to SEQ ID NO: 5754
  Synthetic polynucleotide

SEQ ID NO: 5756 - DNA, 156 bp, Artificial Sequence
  Synthetic polynucleotide
atcatctcaccttgcctcctggagtaccaagtaacgggcctgcaggataattaaagaataattaatcgataattaagacataattaactaataattaaactataattaatgcataattaagtaataattaaggcgcgccatgcttcatcagactct

SEQ ID NO: 5757 - DNA, 156 bp, Artificial Sequence; identical to SEQ ID NO: 5756
  Synthetic polynucleotide

SEQ ID NO: 5758 - DNA, 188 bp, Artificial Sequence
  Synthetic polynucleotide
atcatctcaccttgcctcctgcgccgggtgttgaatcacctgcaggtgactcaaggggagatgactcaaggggtcgtgactcaagggggactgactcaaggggctatgactcaaggggacttgactcaaggggtgctgactcaagggggtatgactcaaggggggcgcgccatgcttcatcagactct

SEQ ID NO: 5759 - DNA, 188 bp, Artificial Sequence; identical to SEQ ID NO: 5758
  Synthetic polynucleotide

SEQ ID NO: 5760 - DNA, 172 bp, Artificial Sequence
  Synthetic polynucleotide
atcatctcaccttgcctcctgattcagtagggtagtgacctgcaggtcgatattgcagatcgatattgctcgtcgatattgcgactcgatattgcctatcgatattgcacttcgatattgctgctcgatattgcgtatcgatattgcggcgcgccatgcttcatcagactct

SEQ ID NO: 5761 - DNA, 172 bp, Artificial Sequence; identical to SEQ ID NO: 5760
  Synthetic polynucleotide

SEQ ID NO: 5762 - DNA, 172 bp, Artificial Sequence
  Synthetic polynucleotide
atcatctcaccttgcctcctggagagggaactctctaacctgcaggcgtgacctctagacgtgacctcttcgcgtgacctctgaccgtgacctctctacgtgacctctactcgtgacctcttgccgtgacctctgtacgtgacctctggcgcgccatgcttcatcagactct

SEQ ID NO: 5763 - DNA, 172 bp, Artificial Sequence; identical to SEQ ID NO: 5762
  Synthetic polynucleotide

SEQ ID NO: 5764 - DNA, 190 bp, Artificial Sequence
  Synthetic polynucleotide
atcatctcaccttgcctcctgtccggtcaattgaccggcctgcaggattttacggaaaatagaattttacggaaaattcgattttacggaaaatgacattttacggaaaatctaattttacggaaaatactattttacggaaaattgcattttacggaaaatgtaggcgcgccatgcttcatcagactct

SEQ ID NO: 5765 - DNA, 190 bp, Artificial Sequence; identical to SEQ ID NO: 5764
  Synthetic polynucleotide

SEQ ID NO: 5766 - DNA, 140 bp, Artificial Sequence
  Synthetic polynucleotide
atcatctcaccttgcctcctgccttgaaacagagctgccctgcaggtaactaagataactatcgtaactagactaactactataactaacttaactatgctaactagtataactaggcgcgccatgcttcatcagactct

SEQ ID NO: 5767 - DNA, 140 bp, Artificial Sequence; identical to SEQ ID NO: 5766
  Synthetic polynucleotide

SEQ ID NO: 5768 - DNA, 191 bp, Artificial Sequence
  Synthetic polynucleotide
atcatctcaccttgcctcctgcggatactctctctgcccctgcaggggcgctgtccatggtgctgaaagaggcgctgtccatggtgctgaatcgggcgctgtccatggtgctgaagacggcgctgtccatggtgctgaactaggcgctgtccatggtgctgaaactggcgcgccatgcttcatcagactct

SEQ ID NO: 5769 - DNA, 191 bp, Artificial Sequence; identical to SEQ ID NO: 5768
  Synthetic polynucleotide

SEQ ID NO: 5770 - DNA, 197 bp, Artificial Sequence
  Synthetic polynucleotide
atcatctcaccttgcctcctgtacctggaatcttcaagcctgcaggcctagcaacagatgaagacctagcaacagatgatcgcctagcaacagatgagaccctagcaacagatgactacctagcaacagatgaactcctagcaacagatgatgccctagcaacagatgagtaggcgcgccatgcttcatcagactct

SEQ ID NO: 5771 - DNA, 197 bp, Artificial Sequence; identical to SEQ ID NO: 5770
  Synthetic polynucleotide

SEQ ID NO: 5772 - DNA, 172 bp, Artificial Sequence
  Synthetic polynucleotide
atcatctcaccttgcctcctgtaccagtatagtcaatccctgcaggtgacatctggagatgacatctggtcgtgacatctgggactgacatctggctatgacatctggacttgacatctggtgctgacatctgggtatgacatctggggcgcgccatgcttcatcagactct

SEQ ID NO: 5773 - DNA, 172 bp, Artificial Sequence; identical to SEQ ID NO: 5772
  Synthetic polynucleotide

SEQ ID NO: 5774 - DNA, 180 bp, Artificial Sequence
  Synthetic polynucleotide
atcatctcaccttgcctcctgggactaaccgagcttgacctgcaggttcaggtgagaagattcaggtgagatcgttcaggtgagagacttcaggtgagactattcaggtgagaactttcaggtgagatgcttcaggtgagagtattcaggtgagaggcgcgccatgcttcatcagactct

SEQ ID NO: 5775 - DNA, 180 bp, Artificial Sequence; identical to SEQ ID NO: 5774
  Synthetic polynucleotide

SEQ ID NO: 5776 - DNA, 172 bp, Artificial Sequence
  Synthetic polynucleotide
atcatctcaccttgcctcctgagaaccaccggagtgttcctgcaggcgctgactcaagacgctgactcatcgcgctgactcagaccgctgactcactacgctgactcaactcgctgactcatgccgctgactcagtacgctgactcaggcgcgccatgcttcatcagactct

SEQ ID NO: 5777 - DNA, 172 bp, Artificial Sequence; identical to SEQ ID NO: 5776
  Synthetic polynucleotide

SEQ ID NO: 5778 - DNA, 190 bp, Artificial Sequence
  Synthetic polynucleotide
atcatctcaccttgcctcctgataacgagtagagcgttcctgcagggtccttatatggccagagtccttatatggcctcggtccttatatggccgacgtccttatatggccctagtccttatatggccactgtccttatatggcctgcgtccttatatggccgtaggcgcgccatgcttcatcagactct

SEQ ID NO: 5779 - DNA, 190 bp, Artificial Sequence; identical to SEQ ID NO: 5778
  Synthetic polynucleotide

SEQ ID NO: 5780 - DNA, 180 bp, Artificial Sequence
  Synthetic polynucleotide
atcatctcaccttgcctcctgaaagagcagacacgttacctgcaggttttaattgctagattttaattgcttcgttttaattgctgacttttaattgctctattttaattgctactttttaattgcttgcttttaattgctgtattttaattgctggcgcgccatgcttcatcagactct

SEQ ID NO: 5781 - DNA, 180 bp, Artificial Sequence; identical to SEQ ID NO: 5780
  Synthetic polynucleotide

SEQ ID NO: 5782 - DNA, 197 bp, Artificial Sequence
  Synthetic polynucleotide
atcatctcaccttgcctcctgctactgtcaatctcggacctgcaggctttgttatgcaaatagactttgttatgcaaattcgctttgttatgcaaatgacctttgttatgcaaatctactttgttatgcaaatactctttgttatgcaaattgcctttgttatgcaaatgtaggcgcgccatgcttcatcagactct

SEQ ID NO: 5783 - DNA, 197 bp, Artificial Sequence; identical to SEQ ID NO: 5782
  Synthetic polynucleotide

SEQ ID NO: 5784 - DNA, 200 bp, Artificial Sequence
  Synthetic polynucleotide
atcatctcaccttgcctcctgattaggattcagtagagcctgcaggaaatgctgactcagcacaaagaaaatgctgactcagcacaatcgaaatgctgactcagcacaagacaaatgctgactcagcacaactaaaatgctgactcagcacaaactaaatgctgactcagcacaaggcgcgccatgcttcatcagactct

SEQ ID NO: 5785 - DNA, 200 bp, Artificial Sequence; identical to SEQ ID NO: 5784
  Synthetic polynucleotide

SEQ ID NO: 5786 - DNA, 185 bp, Artificial Sequence
  Synthetic polynucleotide
atcatctcaccttgcctcctgagttacggcgcagtggacctgcaggaaggtcaaaaggtcaaagaaaggtcaaaaggtcaatcgaaggtcaaaaggtcaagacaaggtcaaaaggtcaactaaaggtcaaaaggtcaaactaaggtcaaaaggtcaatgcggcgcgccatgcttcatcagactct

SEQ ID NO: 5787 - DNA, 185 bp, Artificial Sequence; identical to SEQ ID NO: 5786
  Synthetic polynucleotide

SEQ ID NO: 5788 - DNA, 180 bp, Artificial Sequence
  Synthetic polynucleotide
atcatctcaccttgcctcctgccttcctaatgcatgcgcctgcaggctctgacgtcaagactctgacgtcatcgctctgacgtcagacctctgacgtcactactctgacgtcaactctctgacgtcatgcctctgacgtcagtactctgacgtcaggcgcgccatgcttcatcagactct

SEQ ID NO: 5789 - DNA, 180 bp, Artificial Sequence; identical to SEQ ID NO: 5788
  Synthetic polynucleotide

SEQ ID NO: 5790 - DNA, 156 bp, Artificial Sequence
  Synthetic polynucleotide
atcatctcaccttgcctcctgctagtcggtaggatgttcctgcaggagtaacggagaagtaacggtcgagtaacgggacagtaacggctaagtaacggactagtaacggtgcagtaacgggtaagtaacggggcgcgccatgcttcatcagactct

SEQ ID NO: 5791 - DNA, 156 bp, Artificial Sequence; identical to SEQ ID NO: 5790
  Synthetic polynucleotide

SEQ ID NO: 5792 - DNA, 190 bp, Artificial Sequence
  Synthetic polynucleotide
atcatctcaccttgcctcctggactaagcaggcgcttgcctgcaggtttgcacacggcacagatttgcacacggcactcgtttgcacacggcacgactttgcacacggcacctatttgcacacggcacacttttgcacacggcactgctttgcacacggcacgtaggcgcgccatgcttcatcagactct

SEQ ID NO: 5793 - DNA, 190 bp, Artificial Sequence; identical to SEQ ID NO: 5792
  Synthetic polynucleotide

SEQ ID NO: 5794 - DNA, 180 bp, Artificial Sequence
  Synthetic polynucleotide
atcatctcaccttgcctcctgagtcttatctcccggctcctgcaggaccccgcccccagaaccccgccccctcgaccccgcccccgacaccccgcccccctaaccccgcccccactaccccgccccctgcaccccgcccccgtaaccccgcccccggcgcgccatgcttcatcagactct

SEQ ID NO: 5795 - DNA, 180 bp, Artificial Sequence; identical to SEQ ID NO: 5794
  Synthetic polynucleotide

SEQ ID NO: 5796 - DNA, 197 bp, Artificial Sequence
  Synthetic polynucleotide
atcatctcaccttgcctcctgtcatgcctcttagtagccctgcaggaattttggcgccaaaatgagaaattttggcgccaaaatgtcgaattttggcgccaaaatggacaattttggcgccaaaatgctaaattttggcgccaaaatgactaattttggcgccaaaatgtgcggcgcgccatgcttcatcagactct

SEQ ID NO: 5797 - DNA, 197 bp, Artificial Sequence; identical to SEQ ID NO: 5796
  Synthetic polynucleotide

SEQ ID NO: 5798 - DNA, 196 bp, Artificial Sequence
  Synthetic polynucleotide
atcatctcaccttgcctcctgtagagccaattggagtccctgcaggcaaggttggttgcagacaaggttggttgctcgcaaggttggttgcgaccaaggttggttgcctacaaggttggttgcactcaaggttggttgctgccaaggttggttgcgtacaaggttggttgcggcgcgccatgcttcatcagactct

SEQ ID NO: 5799 - DNA, 196 bp, Artificial Sequence; identical to SEQ ID NO: 5798
  Synthetic polynucleotide

SEQ ID NO: 5800 - DNA, 188 bp, Artificial Sequence
  Synthetic polynucleotide
atcatctcaccttgcctcctgagccgcagggaccttatcctgcaggtgaggtcaatttagatgaggtcaattttcgtgaggtcaatttgactgaggtcaatttctatgaggtcaatttacttgaggtcaattttgctgaggtcaatttgtatgaggtcaatttggcgcgccatgcttcatcagactct

SEQ ID NO: 5801 - DNA, 188 bp, Artificial Sequence; identical to SEQ ID NO: 5800
  Synthetic polynucleotide

SEQ ID NO: 5802 - DNA, 190 bp, Artificial Sequence
  Synthetic polynucleotide
atcatctcaccttgcctcctgattctattcggaccggacctgcaggtggaggtaattaacagatggaggtaattaactcgtggaggtaattaacgactggaggtaattaacctatggaggtaattaacacttggaggtaattaactgctggaggtaattaacgtaggcgcgccatgcttcatcagactct

SEQ ID NO: 5803 - DNA, 190 bp, Artificial Sequence; identical to SEQ ID NO: 5802
  Synthetic polynucleotide

SEQ ID NO: 5804 - DNA, 188 bp, Artificial Sequence
  Synthetic polynucleotide
atcatctcaccttgcctcctgtgcatggtacacttacccctgcaggggcgtgggaggcagaggcgtgggaggctcgggcgtgggaggcgacggcgtgggaggcctaggcgtgggaggcactggcgtgggaggctgcggcgtgggaggcgtaggcgtgggaggcggcgcgccatgcttcatcagactct

SEQ ID NO: 5805 - DNA, 188 bp, Artificial Sequence; identical to SEQ ID NO: 5804
  Synthetic polynucleotide

SEQ ID NO: 5806 - DNA, 191 bp, Artificial Sequence
  Synthetic polynucleotide
atcatctcaccttgcctcctgtgaggcgcattatactacctgcaggtgccttaattaatgctcagatgccttaattaatgctctcgtgccttaattaatgctcgactgccttaattaatgctcctatgccttaattaatgctcacttgccttaattaatgctctgcggcgcgccatgcttcatcagactct

SEQ ID NO: 5807 - DNA, 191 bp, Artificial Sequence; identical to SEQ ID NO: 5806
  Synthetic polynucleotide

SEQ ID NO: 5808 - DNA, 172 bp, Artificial Sequence
  Synthetic polynucleotide
atcatctcaccttgcctcctgtcgatacgtgacgggagcctgcagggaggtgtcaaagagaggtgtcaatcggaggtgtcaagacgaggtgtcaactagaggtgtcaaactgaggtgtcaatgcgaggtgtcaagtagaggtgtcaaggcgcgccatgcttcatcagactct

SEQ ID NO: 5809 - DNA, 172 bp, Artificial Sequence; identical to SEQ ID NO: 5808
  Synthetic polynucleotide

SEQ ID NO: 5810 - DNA, 197 bp, Artificial Sequence
  Synthetic polynucleotide
atcatctcaccttgcctcctggataggagtagattcgtcctgcaggtatgtaaatattgacataagatatgtaaatattgacatatcgtatgtaaatattgacatagactatgtaaatattgacatactatatgtaaatattgacataacttatgtaaatattgacatatgcggcgcgccatgcttcatcagactct

SEQ ID NO: 5811 - DNA, 197 bp, Artificial Sequence; identical to SEQ ID NO: 5810
  Synthetic polynucleotide

SEQ ID NO: 5812 - DNA, 156 bp, Artificial Sequence
  Synthetic polynucleotide
atcatctcaccttgcctcctgaggatcaggagatattgcctgcagggatttcttagagatttctttcggatttcttgacgatttcttctagatttcttactgatttctttgcgatttcttgtagatttcttggcgcgccatgcttcatcagactct

SEQ ID NO: 5813 - DNA, 156 bp, Artificial Sequence; identical to SEQ ID NO: 5812
  Synthetic polynucleotide

SEQ ID NO: 5814 - DNA, 191 bp, Artificial Sequence
  Synthetic polynucleotide
atcatctcaccttgcctcctgcctcccgttacgccattcctgcaggaagacgctgtaaagcgaagaaagacgctgtaaagcgatcgaagacgctgtaaagcgagacaagacgctgtaaagcgactaaagacgctgtaaagcgaactaagacgctgtaaagcgatgcggcgcgccatgcttcatcagactct

SEQ ID NO: 5815 - DNA, 191 bp, Artificial Sequence; identical to SEQ ID NO: 5814
  Synthetic polynucleotide

SEQ ID NO: 5816 - DNA, 172 bp, Artificial Sequence
  Synthetic polynucleotide
atcatctcaccttgcctcctggaatgggcgcctttcaacctgcagggatttgcataagagatttgcatatcggatttgcatagacgatttgcatactagatttgcataactgatttgcatatgcgatttgcatagtagatttgcataggcgcgccatgcttcatcagactct

SEQ ID NO: 5817 - DNA, 172 bp, Artificial Sequence; identical to SEQ ID NO: 5816
  Synthetic polynucleotide

SEQ ID NO: 5818 - DNA, 180 bp, Artificial Sequence
  Synthetic polynucleotide
atcatctcaccttgcctcctggatacctaaagtcgcgtcctgcaggaggccttatctagaaggccttatcttcgaggccttatctgacaggccttatctctaaggccttatctactaggccttatcttgcaggccttatctgtaaggccttatctggcgcgccatgcttcatcagactct

SEQ ID NO: 5819 - DNA, 180 bp, Artificial Sequence; identical to SEQ ID NO: 5818
  Synthetic polynucleotide

SEQ ID NO: 5820 - DNA, 190 bp, Artificial Sequence
  Synthetic polynucleotide
atcatctcaccttgcctcctgtcgtagaagccgtggtccctgcaggggggcgggggcgggagaggggcgggggcgggtcgggggcgggggcggggacggggcgggggcgggctaggggcgggggcgggactggggcgggggcgggtgcggggcgggggcggggtaggcgcgccatgcttcatcagactct

SEQ ID NO: 5821 - DNA, 190 bp, Artificial Sequence; identical to SEQ ID NO: 5820
  Synthetic polynucleotide

SEQ ID NO: 5822 - DNA, 197 bp, Artificial Sequence
  Synthetic polynucleotide
atcatctcaccttgcctcctgccggttctggtactaagcctgcaggggttgcctagcaacgagaggttgcctagcaacgtcgggttgcctagcaacggacggttgcctagcaacgctaggttgcctagcaacgactggttgcctagcaacgtgcggttgcctagcaacggtaggcgcgccatgcttcatcagactct

SEQ ID NO: 5823 - DNA, 197 bp, Artificial Sequence; identical to SEQ ID NO: 5822
  Synthetic polynucleotide

SEQ ID NO: 5824 - DNA, 156 bp, Artificial Sequence
  Synthetic polynucleotide
atcatctcaccttgcctcctgtgagtatgtgtgataggcctgcaggactaattaagaactaattatcgactaattagacactaattactaactaattaactactaattatgcactaattagtaactaattaggcgcgccatgcttcatcagactct

SEQ ID NO: 5825 - DNA, 156 bp, Artificial Sequence; identical to SEQ ID NO: 5824
  Synthetic polynucleotide

SEQ ID NO: 5826 - DNA, 183 bp, Artificial Sequence
  Synthetic polynucleotide
atcatctcaccttgcctcctggaccaaccaaagtaggtcctgcaggccgccatcttggttaagggcagaggagaccgccatcttggttaagggcagaggtcgccgccatcttggttaagggcagagggacccgccatcttggttaagggcagaggctaggcgcgccatgcttcatcagactct

SEQ ID NO: 5827 - DNA, 183 bp, Artificial Sequence; identical to SEQ ID NO: 5826
  Synthetic polynucleotide

SEQ ID NO: 5828 - DNA, 180 bp, Artificial Sequence
  Synthetic polynucleotide
atcatctcaccttgcctcctgccatggacgatcaaagtcctgcaggacggacacaatagaacggacacaattcgacggacacaatgacacggacacaatctaacggacacaatactacggacacaattgcacggacacaatgtaacggacacaatggcgcgccatgcttcatcagactct

SEQ ID NO: 5829 - DNA, 180 bp, Artificial Sequence; identical to SEQ ID NO: 5828
  Synthetic polynucleotide

SEQ ID NO: 5830 - DNA, 188 bp, Artificial Sequence
  Synthetic polynucleotide
atcatctcaccttgcctcctgccttgcctctcgattaacctgcaggattgcccgccgcagaattgcccgccgctcgattgcccgccgcgacattgcccgccgcctaattgcccgccgcactattgcccgccgctgcattgcccgccgcgtaattgcccgccgcggcgcgccatgcttcatcagactct

SEQ ID NO: 5831 - DNA, 188 bp, Artificial Sequence; identical to SEQ ID NO: 5830
  Synthetic polynucleotide

SEQ ID NO: 5832 - DNA, 197 bp, Artificial Sequence
  Synthetic polynucleotide
atcatctcaccttgcctcctggtgcttctgaaagaaggcctgcaggctgagtcagcaatttagactgagtcagcaattttcgctgagtcagcaatttgacctgagtcagcaatttctactgagtcagcaatttactctgagtcagcaattttgcctgagtcagcaatttgtaggcgcgccatgcttcatcagactct

SEQ ID NO: 5833 - DNA, 197 bp, Artificial Sequence; identical to SEQ ID NO: 5832
  Synthetic polynucleotide

SEQ ID NO: 5834 - DNA, 191 bp, Artificial Sequence
  Synthetic polynucleotide
atcatctcaccttgcctcctgaccaagatgtccgtgtgcctgcagggatcaatgttattgattagagatcaatgttattgatttcggatcaatgttattgattgacgatcaatgttattgattctagatcaatgttattgattactgatcaatgttattgatttgcggcgcgccatgcttcatcagactct

SEQ ID NO: 5835 - DNA, 191 bp, Artificial Sequence; identical to SEQ ID NO: 5834
  Synthetic polynucleotide

SEQ ID NO: 5836 - DNA, 172 bp, Artificial Sequence
  Synthetic polynucleotide
atcatctcaccttgcctcctgactgctacccatgtcaacctgcaggttgcatcagcagattgcatcagctcgttgcatcagcgacttgcatcagcctattgcatcagcactttgcatcagctgcttgcatcagcgtattgcatcagcggcgcgccatgcttcatcagactct

SEQ ID NO: 5837 - DNA, 172 bp, Artificial Sequence; identical to SEQ ID NO: 5836
  Synthetic polynucleotide

SEQ ID NO: 5838 - DNA, 180 bp, Artificial Sequence
  Synthetic polynucleotide
atcatctcaccttgcctcctgagcgattggtcccgttgcctgcaggacttagtcactagaacttagtcacttcgacttagtcactgacacttagtcactctaacttagtcactactacttagtcacttgcacttagtcactgtaacttagtcactggcgcgccatgcttcatcagactct

SEQ ID NO: 5839 - DNA, 180 bp, Artificial Sequence; identical to SEQ ID NO: 5838
  Synthetic polynucleotide

SEQ ID NO: 5840 - DNA, 191 bp, Artificial Sequence
  Synthetic polynucleotide
atcatctcaccttgcctcctgtactacgctcctgtgctcctgcaggttagggtacgccaaagaagattagggtacgccaaagatcgttagggtacgccaaagagacttagggtacgccaaagactattagggtacgccaaagaactttagggtacgccaaagatgcggcgcgccatgcttcatcagactct

SEQ ID NO: 5841 - DNA, 191 bp, Artificial Sequence; identical to SEQ ID NO: 5840
  Synthetic polynucleotide

SEQ ID NO: 5842 - DNA, 191 bp, Artificial Sequence
  Synthetic polynucleotide
atcatctcaccttgcctcctgtgaccaccagcggtactcctgcaggtctttggcgtaccctaaagatctttggcgtaccctaatcgtctttggcgtaccctaagactctttggcgtaccctaactatctttggcgtaccctaaacttctttggcgtaccctaatgcggcgcgccatgcttcatcagactct

SEQ ID NO: 5843 - DNA, 191 bp, Artificial Sequence; identical to SEQ ID NO: 5842
  Synthetic polynucleotide

SEQ ID NO: 5844 - DNA, 148 bp, Artificial Sequence
  Synthetic polynucleotide
atcatctcaccttgcctcctgagaagtatagcgcgaaacctgcaggatcaaagagaatcaaagtcgatcaaaggacatcaaagctaatcaaagactatcaaagtgcatcaaaggtaatcaaagggcgcgccatgcttcatcagactct

SEQ ID NO: 5845 - DNA, 148 bp, Artificial Sequence; identical to SEQ ID NO: 5844
  Synthetic polynucleotide

SEQ ID NO: 5846 - DNA, 191 bp, Artificial Sequence
  Synthetic polynucleotide
atcatctcaccttgcctcctgattcgatgttcatggctcctgcaggtacaacaacctgttcttagatacaacaacctgttctttcgtacaacaacctgttcttgactacaacaacctgttcttctatacaacaacctgttcttacttacaacaacctgttctttgcggcgcgccatgcttcatcagactct

SEQ ID NO: 5847 - DNA, 191 bp, Artificial Sequence; identical to SEQ ID NO: 5846
  Synthetic polynucleotide

SEQ ID NO: 5848 - DNA, 156 bp, Artificial Sequence
  Synthetic polynucleotide
atcatctcaccttgcctcctggctagtatggtgtaagtcctgcaggataattggagaataattggtcgataattgggacataattggctaataattggactataattggtgcataattgggtaataattggggcgcgccatgcttcatcagactct

SEQ ID NO: 5849 - DNA, 156 bp, Artificial Sequence; identical to SEQ ID NO: 5848
  Synthetic polynucleotide

SEQ ID NO: 5850 - DNA, 172 bp, Artificial Sequence
  Synthetic polynucleotide
atcatctcaccttgcctcctgaggcgagtcaagtcctacctgcaggaattgggtcaagaaattgggtcatcgaattgggtcagacaattgggtcactaaattgggtcaactaattgggtcatgcaattgggtcagtaaattgggtcaggcgcgccatgcttcatcagactct

SEQ ID NO: 5851 - DNA, 172 bp, Artificial Sequence; identical to SEQ ID NO: 5850
  Synthetic polynucleotide

SEQ ID NO: 5852 - DNA, 196 bp, Artificial Sequence
  Synthetic polynucleotide
atcatctcaccttgcctcctgggaaatcgtatgtagggcctgcaggttgacctacttatagattgacctacttattcgttgacctacttatgacttgacctacttatctattgacctacttatactttgacctacttattgcttgacctacttatgtattgacctacttatggcgcgccatgcttcatcagactct

SEQ ID NO: 5853 - DNA, 196 bp, Artificial Sequence; identical to SEQ ID NO: 5852
  Synthetic polynucleotide

SEQ ID NO: 5854 - DNA, 180 bp, Artificial Sequence
  Synthetic polynucleotide
atcatctcaccttgcctcctggtggcgaggcaagaactcctgcagggccataaatcaagagccataaatcatcggccataaatcagacgccataaatcactagccataaatcaactgccataaatcatgcgccataaatcagtagccataaatcaggcgcgccatgcttcatcagactct

SEQ ID NO: 5855 - DNA, 180 bp, Artificial Sequence; identical to SEQ ID NO: 5854
  Synthetic polynucleotide

SEQ ID NO: 5856 - DNA, 140 bp, Artificial Sequence
  Synthetic polynucleotide
atcatctcaccttgcctcctgtaacgcctgcttatcatcctgcaggggggcaagaggggcatcgggggcagacggggcactaggggcaactggggcatgcggggcagtaggggcaggcgcgccatgcttcatcagactct

SEQ ID NO: 5857 - DNA, 140 bp, Artificial Sequence; identical to SEQ ID NO: 5856
  Synthetic polynucleotide

SEQ ID NO: 5858 - DNA, 185 bp, Artificial Sequence
  Synthetic polynucleotide
atcatctcaccttgcctcctggaattgcgccagatttacctgcagggggtccaaagtccaatagagggtccaaagtccaattcggggtccaaagtccaatgacgggtccaaagtccaatctagggtccaaagtccaatactgggtccaaagtccaattgcggcgcgccatgcttcatcagactct

SEQ ID NO: 5859 - DNA, 185 bp, Artificial Sequence; identical to SEQ ID NO: 5858
  Synthetic polynucleotide

SEQ ID NO: 5860 - DNA, 191 bp, Artificial Sequence
  Synthetic polynucleotide
atcatctcaccttgcctcctgtaatctaagcccgtccacctgcagggatcaatgttattgatgagagatcaatgttattgatgtcggatcaatgttattgatggacgatcaatgttattgatgctagatcaatgttattgatgactgatcaatgttattgatgtgcggcgcgccatgcttcatcagactct

SEQ ID NO: 5861 - DNA, 191 bp, Artificial Sequence; identical to SEQ ID NO: 5860
  Synthetic polynucleotide

SEQ ID NO: 5862 - DNA, 180 bp, Artificial Sequence
  Synthetic polynucleotide
atcatctcaccttgcctcctgctagcgcctaagacattcctgcaggcttcctggaagagacttcctggaagtcgcttcctggaaggaccttcctggaagctacttcctggaagactcttcctggaagtgccttcctggaaggtacttcctggaagggcgcgccatgcttcatcagactct

SEQ ID NO: 5863 - DNA, 180 bp, Artificial Sequence; identical to SEQ ID NO: 5862
  Synthetic polynucleotide

SEQ ID NO: 5864 - DNA, 156 bp, Artificial Sequence
  Synthetic polynucleotide
atcatctcaccttgcctcctgtatggactgtgctcgaccctgcaggataattgcagaataattgctcgataattgcgacataattgcctaataattgcactataattgctgcataattgcgtaataattgcggcgcgccatgcttcatcagactct

SEQ ID NO: 5865 - DNA, 156 bp, Artificial Sequence; identical to SEQ ID NO: 5864
  Synthetic polynucleotide

SEQ ID NO: 5866 - DNA, 172 bp, Artificial Sequence
  Synthetic polynucleotide
atcatctcaccttgcctcctgagcgtttaatgcggcgacctgcaggctgattggctagactgattggcttcgctgattggctgacctgattggctctactgattggctactctgattggcttgcctgattggctgtactgattggctggcgcgccatgcttcatcagactct

SEQ ID NO: 5867 - DNA, 172 bp, Artificial Sequence; identical to SEQ ID NO: 5866
  Synthetic polynucleotide

SEQ ID NO: 5868 - DNA, 197 bp, Artificial Sequence
  Synthetic polynucleotide
atcatctcaccttgcctcctgccaccacaacttcccagcctgcaggaaattccaggaaatcagaaaattccaggaaatctcgaaattccaggaaatcgacaaattccaggaaatcctaaaattccaggaaatcactaaattccaggaaatctgcaaattccaggaaatcgtaggcgcgccatgcttcatcagactct

SEQ ID NO: 5869 - DNA, 197 bp, Artificial Sequence; identical to SEQ ID NO: 5868
  Synthetic polynucleotide

SEQ ID NO: 5870 - DNA, 197 bp, Artificial Sequence
  Synthetic polynucleotide
atcatctcaccttgcctcctgatctgatggcatttgtgcctgcaggtatgtcaatatttacataagatatgtcaatatttacatatcgtatgtcaatatttacatagactatgtcaatatttacatactatatgtcaatatttacataacttatgtcaatatttacatatgcggcgcgccatgcttcatcagactct

SEQ ID NO: 5871 - DNA, 197 bp, Artificial Sequence; identical to SEQ ID NO: 5870
  Synthetic polynucleotide

SEQ ID NO: 5872 - DNA, 164 bp, Artificial Sequence
  Synthetic polynucleotide
atcatctcaccttgcctcctgcgctggatccattcatccctgcagggacagatgtagagacagatgttcggacagatgtgacgacagatgtctagacagatgtactgacagatgttgcgacagatgtgtagacagatgtggcgcgccatgcttcatcagactct

SEQ ID NO: 5873 - DNA, 164 bp, Artificial Sequence; identical to SEQ ID NO: 5872
  Synthetic polynucleotide

SEQ ID NO: 5874 - DNA, 172 bp, Artificial Sequence
  Synthetic polynucleotide
atcatctcaccttgcctcctgtaatctccagatggttgcctgcaggaggtcaccttagaaggtcacctttcgaggtcaccttgacaggtcaccttctaaggtcaccttactaggtcacctttgcaggtcaccttgtaaggtcaccttggcgcgccatgcttcatcagactct

SEQ ID NO: 5875 - DNA, 172 bp, Artificial Sequence; identical to SEQ ID NO: 5874
  Synthetic polynucleotide

SEQ ID NO: 5876 - DNA, 191 bp, Artificial Sequence
  Synthetic polynucleotide
atcatctcaccttgcctcctggcagtatggccacgatgcctgcaggaaacggttcaggaagttcatcagaaaacggttcaggaagttcatctcgaaacggttcaggaagttcatcgacaaacggttcaggaagttcatcctaaaacggttcaggaagttcatcactggcgcgccatgcttcatcagactct

SEQ ID NO: 5877 - DNA, 191 bp, Artificial Sequence; identical to SEQ ID NO: 5876
  Synthetic polynucleotide

SEQ ID NO: 5878 - DNA, 196 bp, Artificial Sequence
  Synthetic polynucleotide
atcatctcaccttgcctcctggatagggttgtgacagccctgcaggtaattaggtcgagagataattaggtcgagtcgtaattaggtcgaggactaattaggtcgagctataattaggtcgagacttaattaggtcgagtgctaattaggtcgaggtataattaggtcgagggcgcgccatgcttcatcagactct

SEQ ID NO: 5879 - DNA, 196 bp, Artificial Sequence; identical to SEQ ID NO: 5878
  Synthetic polynucleotide

SEQ ID NO: 5880 - DNA, 180 bp, Artificial Sequence
  Synthetic polynucleotide
atcatctcaccttgcctcctgcggctcaaaccttgtaccctgcagggctgattggctagagctgattggcttcggctgattggctgacgctgattggctctagctgattggctactgctgattggcttgcgctgattggctgtagctgattggctggcgcgccatgcttcatcagactct

SEQ ID NO: 5881 - DNA, 180 bp, Artificial Sequence; identical to SEQ ID NO: 5880
  Synthetic polynucleotide

SEQ ID NO: 5882 - DNA, 188 bp, Artificial Sequence
  Synthetic polynucleotide
atcatctcaccttgcctcctgacactagatgatttctccctgcaggggttacgtcaccagaggttacgtcacctcgggttacgtcaccgacggttacgtcaccctaggttacgtcaccactggttacgtcacctgcggttacgtcaccgtaggttacgtcaccggcgcgccatgcttcatcagactct

SEQ ID NO: 5883 - DNA, 188 bp, Artificial Sequence; identical to SEQ ID NO: 5882
  Synthetic polynucleotide

SEQ ID NO: 5884 - DNA, 172 bp, Artificial Sequence
  Synthetic polynucleotide
atcatctcaccttgcctcctgtatttggcaccaaccaccctgcaggcattaaaattagacattaaaatttcgcattaaaattgaccattaaaattctacattaaaattactcattaaaatttgccattaaaattgtacattaaaattggcgcgccatgcttcatcagactct

SEQ ID NO: 5885 - DNA, 172 bp, Artificial Sequence; identical to SEQ ID NO: 5884
  Synthetic polynucleotide

SEQ ID NO: 5886 - DNA, 197 bp, Artificial Sequence
  Synthetic polynucleotide
atcatctcaccttgcctcctgtggagctgaattgcagtcctgcaggtggttaataattaacagtagatggttaataattaacagttcgtggttaataattaacagtgactggttaataattaacagtctatggttaataattaacagtacttggttaataattaacagttgcggcgcgccatgcttcatcagactct

SEQ ID NO: 5887 - DNA, 197 bp, Artificial Sequence; identical to SEQ ID NO: 5886
  Synthetic polynucleotide

SEQ ID NO: 5888 - DNA, 172 bp, Artificial Sequence
  Synthetic polynucleotide
atcatctcaccttgcctcctgggtaactccaaatcgtccctgcagggcaggtgttcagagcaggtgttctcggcaggtgttcgacgcaggtgttcctagcaggtgttcactgcaggtgttctgcgcaggtgttcgtagcaggtgttcggcgcgccatgcttcatcagactct

SEQ ID NO: 5889 - DNA, 172 bp, Artificial Sequence; identical to SEQ ID NO: 5888
  Synthetic polynucleotide

SEQ ID NO: 5890 - DNA, 200 bp, Artificial Sequence
  Synthetic polynucleotide
atcatctcaccttgcctcctgtttgtaggtccacggctcctgcaggtagcgccccctggtggccaagatagcgccccctggtggccatcgtagcgccccctggtggccagactagcgccccctggtggccactatagcgccccctggtggccaacttagcgccccctggtggccaggcgcgccatgcttcatcagactct

SEQ ID NO: 5891 - DNA, 200 bp, Artificial Sequence; identical to SEQ ID NO: 5890
  Synthetic polynucleotide

SEQ ID NO: 5892 - DNA, 185 bp, Artificial Sequence
  Synthetic polynucleotide
atcatctcaccttgcctcctgactttagggataaactgcctgcaggaggccacgtgccggatagaaggccacgtgccggattcgaggccacgtgccggatgacaggccacgtgccggatctaaggccacgtgccggatactaggccacgtgccggattgcggcgcgccatgcttcatcagactct

SEQ ID NO: 5893 - DNA, 185 bp, Artificial Sequence; identical to SEQ ID NO: 5892
  Synthetic polynucleotide

SEQ ID NO: 5894 - DNA, 172 bp, Artificial Sequence
  Synthetic polynucleotide
atcatctcaccttgcctcctgttaaccctgaaccgcatcctgcaggtgtatcaattagatgtatcaatttcgtgtatcaattgactgtatcaattctatgtatcaattacttgtatcaatttgctgtatcaattgtatgtatcaattggcgcgccatgcttcatcagactct

SEQ ID NO: 5895 - DNA, 172 bp, Artificial Sequence; identical to SEQ ID NO: 5894
  Synthetic polynucleotide

SEQ ID NO: 5896 - DNA, 191 bp, Artificial Sequence
  Synthetic polynucleotide
atcatctcaccttgcctcctgtgggtggcagtgcaaagcctgcaggatccattaattaattgaagaatccattaattaattgatcgatccattaattaattgagacatccattaattaattgactaatccattaattaattgaactatccattaattaattgatgcggcgcgccatgcttcatcagactct

SEQ ID NO: 5897 - DNA, 191 bp, Artificial Sequence; identical to SEQ ID NO: 5896
  Synthetic polynucleotide

SEQ ID NO: 5898 - DNA, 196 bp, Artificial Sequence
  Synthetic polynucleotide
atcatctcaccttgcctcctgctcgtttgtaagcaaaccctgcaggattaaccctttctagaattaaccctttcttcgattaaccctttctgacattaaccctttctctaattaaccctttctactattaaccctttcttgcattaaccctttctgtaattaaccctttctggcgcgccatgcttcatcagactct

SEQ ID NO: 5899 - DNA, 196 bp, Artificial Sequence; identical to SEQ ID NO: 5898
  Synthetic polynucleotide

SEQ ID NO: 5900 - DNA, 196 bp, Artificial Sequence
  Synthetic polynucleotide
atcatctcaccttgcctcctgtaggatgccttctctatcctgcaggcatccagatgttcagacatccagatgttctcgcatccagatgttcgaccatccagatgttcctacatccagatgttcactcatccagatgttctgccatccagatgttcgtacatccagatgttcggcgcgccatgcttcatcagactct

SEQ ID NO: 5901 - DNA, 196 bp, Artificial Sequence; identical to SEQ ID NO: 5900
  Synthetic polynucleotide

SEQ ID NO: 5902 - DNA, 190 bp, Artificial Sequence
  Synthetic polynucleotide
atcatctcaccttgcctcctggctcgtataggtggtgacctgcagggggtgacgtcagagagagggtgacgtcagagtcggggtgacgtcagaggacgggtgacgtcagagctagggtgacgtcagagactgggtgacgtcagagtgcgggtgacgtcagaggtaggcgcgccatgcttcatcagactct

SEQ ID NO: 5903 - DNA, 190 bp, Artificial Sequence; identical to SEQ ID NO: 5902
  Synthetic polynucleotide

SEQ ID NO: 5904 - DNA, 172 bp, Artificial Sequence
  Synthetic polynucleotide
atcatctcaccttgcctcctggtctccgtggttgtcctcctgcaggccacgtgaccagaccacgtgacctcgccacgtgaccgacccacgtgaccctaccacgtgaccactccacgtgacctgcccacgtgaccgtaccacgtgaccggcgcgccatgcttcatcagactct

SEQ ID NO: 5905 - DNA, 172 bp, Artificial Sequence; identical to SEQ ID NO: 5904
  Synthetic polynucleotide

SEQ ID NO: 5906 - DNA, 180 bp, Artificial Sequence
  Synthetic polynucleotide
atcatctcaccttgcctcctgacaaacgggatggttgccctgcaggggcggcagggcagaggcggcagggctcgggcggcagggcgacggcggcagggcctaggcggcagggcactggcggcagggctgcggcggcagggcgtaggcggcagggcggcgcgccatgcttcatcagactct

SEQ ID NO: 5907 - DNA, 180 bp, Artificial Sequence; identical to SEQ ID NO: 5906
  Synthetic polynucleotide

SEQ ID NO: 5908 - DNA, 185 bp, Artificial Sequence
  Synthetic polynucleotide
atcatctcaccttgcctcctgcagaacacttcacagatcctgcaggggttgccatggcaacgagaggttgccatggcaacgtcgggttgccatggcaacggacggttgccatggcaacgctaggttgccatggcaacgactggttgccatggcaacgtgcggcgcgccatgcttcatcagactct

SEQ ID NO: 5909 - DNA, 185 bp, Artificial Sequence; identical to SEQ ID NO: 5908
  Synthetic polynucleotide

SEQ ID NO: 5910 - DNA, 164 bp, Artificial Sequence
  Synthetic polynucleotide
atcatctcaccttgcctcctgcgcggcctttagagtctcctgcaggcgtcacgctagacgtcacgcttcgcgtcacgctgaccgtcacgctctacgtcacgctactcgtcacgcttgccgtcacgctgtacgtcacgctggcgcgccatgcttcatcagactct

SEQ ID NO: 5911 - DNA, 164 bp, Artificial Sequence; identical to SEQ ID NO: 5910
  Synthetic polynucleotide

SEQ ID NO: 5912 - DNA, 196 bp, Artificial Sequence
  Synthetic polynucleotide
atcatctcaccttgcctcctgaaccctaccgaagtaatcctgcaggtgacagttttatgagatgacagttttatgtcgtgacagttttatggactgacagttttatgctatgacagttttatgacttgacagttttatgtgctgacagttttatggtatgacagttttatgggcgcgccatgcttcatcagactct

SEQ ID NO: 5913 - DNA, 196 bp, Artificial Sequence; identical to SEQ ID NO: 5912
  Synthetic polynucleotide

SEQ ID NO: 5914 - DNA, 197 bp, Artificial Sequence
  Synthetic polynucleotide
atcatctcaccttgcctcctgctcaatctgcatcgagtcctgcaggaagtatgagtcatcaagaaagtatgagtcatcatcgaagtatgagtcatcagacaagtatgagtcatcactaaagtatgagtcatcaactaagtatgagtcatcatgcaagtatgagtcatcagtaggcgcgccatgcttcatcagactct

SEQ ID NO: 5915 - DNA, 197 bp, Artificial Sequence; identical to SEQ ID NO: 5914
  Synthetic polynucleotide

SEQ ID NO: 5916 - DNA, 191 bp, Artificial Sequence
  Synthetic polynucleotide
atcatctcaccttgcctcctgagcattcctgggataaacctgcaggtaaagaacaatagataaagataaagaacaatagataatcgtaaagaacaatagataagactaaagaacaatagataactataaagaacaatagataaacttaaagaacaatagataatgcggcgcgccatgcttcatcagactct

SEQ ID NO: 5917 - DNA, 191 bp, Artificial Sequence; identical to SEQ ID NO: 5916
  Synthetic polynucleotide

SEQ ID NO: 5918 - DNA, 180 bp, Artificial Sequence
  Synthetic polynucleotide
atcatctcaccttgcctcctgaaacaccgctgcgacttcctgcaggacacccactctagaacacccactcttcgacacccactctgacacacccactctctaacacccactctactacacccactcttgcacacccactctgtaacacccactctggcgcgccatgcttcatcagactct

SEQ ID NO: 5919 - DNA, 180 bp, Artificial Sequence; identical to SEQ ID NO: 5918
  Synthetic polynucleotide

SEQ ID NO: 5920 - DNA, 196 bp, Artificial Sequence
  Synthetic polynucleotide
atcatctcaccttgcctcctgcggattgacacttcttgcctgcaggcataaaactgtcaagacataaaactgtcatcgcataaaactgtcagaccataaaactgtcactacataaaactgtcaactcataaaactgtcatgccataaaactgtcagtacataaaactgtcaggcgcgccatgcttcatcagactct

SEQ ID NO: 5921 - DNA, 196 bp, Artificial Sequence; identical to SEQ ID NO: 5920
  Synthetic polynucleotide

SEQ ID NO: 5922 - DNA, 156 bp, Artificial Sequence
  Synthetic polynucleotide
atcatctcaccttgcctcctgtccgtagagtctcggaccctgcagggggaaatcagagggaaatctcggggaaatcgacgggaaatcctagggaaatcactgggaaatctgcgggaaatcgtagggaaatcggcgcgccatgcttcatcagactct

SEQ ID NO: 5923 - DNA, 156 bp, Artificial Sequence; identical to SEQ ID NO: 5922
  Synthetic polynucleotide

SEQ ID NO: 5924 - DNA, 196 bp, Artificial Sequence
  Synthetic polynucleotide
atcatctcaccttgcctcctggagtccttcctactattcctgcaggggatgtttgtttaagaggatgtttgtttatcgggatgtttgtttagacggatgtttgtttactaggatgtttgtttaactggatgtttgtttatgcggatgtttgtttagtaggatgtttgtttaggcgcgccatgcttcatcagactct

SEQ ID NO: 5925 - DNA, 196 bp, Artificial Sequence; identical to SEQ ID NO: 5924
  Synthetic polynucleotide

SEQ ID NO: 5926 - DNA, 188 bp, Artificial Sequence
  Synthetic polynucleotide
atcatctcaccttgcctcctgattacccacaaggtggacctgcaggaaaccacttaaaagaaaaccacttaaatcgaaaccacttaaagacaaaccacttaaactaaaaccacttaaaactaaaccacttaaatgcaaaccacttaaagtaaaaccacttaaaggcgcgccatgcttcatcagactct

SEQ ID NO: 5927 - DNA, 188 bp, Artificial Sequence; identical to SEQ ID NO: 5926
  Synthetic polynucleotide

SEQ ID NO: 5928 - DNA, 197 bp, Artificial Sequence
  Synthetic polynucleotide
atcatctcaccttgcctcctgtttgggcctgtcgaatacctgcaggggggtgggggaggggagaggggtgggggaggggtcgggggtgggggagggggacggggtgggggaggggctaggggtgggggaggggactggggtgggggaggggtgcggggtgggggagggggtaggcgcgccatgcttcatcagactct

SEQ ID NO: 5929 - DNA, 197 bp, Artificial Sequence; identical to SEQ ID NO: 5928
  Synthetic polynucleotide

SEQ ID NO: 5930 - DNA, 180 bp, Artificial Sequence
  Synthetic polynucleotide
atcatctcaccttgcctcctggcacctaactagcaggccctgcaggccgctgactccagaccgctgactcctcgccgctgactccgacccgctgactccctaccgctgactccactccgctgactcctgcccgctgactccgtaccgctgactccggcgcgccatgcttcatcagactct

SEQ ID NO: 5931 - DNA, 180 bp, Artificial Sequence; identical to SEQ ID NO: 5930
  Synthetic polynucleotide

SEQ ID NO: 5932 - DNA, 172 bp, Artificial Sequence
  Synthetic polynucleotide
atcatctcaccttgcctcctgacctatgggtcttatggcctgcaggatgaccttgaagaatgaccttgatcgatgaccttgagacatgaccttgactaatgaccttgaactatgaccttgatgcatgaccttgagtaatgaccttgaggcgcgccatgcttcatcagactct

SEQ ID NO: 5933 - DNA, 172 bp, Artificial Sequence; identical to SEQ ID NO: 5932
  Synthetic polynucleotide

SEQ ID NO: 5934 - DNA, 196 bp, Artificial Sequence
  Synthetic polynucleotide
atcatctcaccttgcctcctggaaatatcccgtaattgcctgcagggaatgttctatatagagaatgttctatattcggaatgttctatatgacgaatgttctatatctagaatgttctatatactgaatgttctatattgcgaatgttctatatgtagaatgttctatatggcgcgccatgcttcatcagactct

SEQ ID NO: 5935 - DNA, 196 bp, Artificial Sequence; identical to SEQ ID NO: 5934
  Synthetic polynucleotide

SEQ ID NO: 5936 - DNA, 190 bp, Artificial Sequence
  Synthetic polynucleotide
atcatctcaccttgcctcctggctgataatcagaaagacctgcaggaatatgcaaattagagaaatatgcaaattagtcgaatatgcaaattaggacaatatgcaaattagctaaatatgcaaattagactaatatgcaaattagtgcaatatgcaaattaggtaggcgcgccatgcttcatcagactct

SEQ ID NO: 5937 - DNA, 190 bp, Artificial Sequence; identical to SEQ ID NO: 5936
  Synthetic polynucleotide

SEQ ID NO: 5938 - DNA, 191 bp, Artificial Sequence
  Synthetic polynucleotide
atcatctcaccttgcctcctggctgcaaagccgaatcgcctgcaggtggaatgtcaggaatgtagatggaatgtcaggaatgttcgtggaatgtcaggaatgtgactggaatgtcaggaatgtctatggaatgtcaggaatgtacttggaatgtcaggaatgttgcggcgcgccatgcttcatcagactct

SEQ ID NO: 5939 - DNA, 191 bp, Artificial Sequence; identical to SEQ ID NO: 5938
  Synthetic polynucleotide

SEQ ID NO: 5940 - DNA, 190 bp, Artificial Sequence
  Synthetic polynucleotide
atcatctcaccttgcctcctggtcagcctcacgtacttcctgcaggatgaattaatgcatagaatgaattaatgcattcgatgaattaatgcatgacatgaattaatgcatctaatgaattaatgcatactatgaattaatgcattgcatgaattaatgcatgtaggcgcgccatgcttcatcagactct

SEQ ID NO: 5941 - DNA, 190 bp, Artificial Sequence; identical to SEQ ID NO: 5940
  Synthetic polynucleotide

SEQ ID NO: 5942 - DNA, 188 bp, Artificial Sequence
  Synthetic polynucleotide
atcatctcaccttgcctcctgttccacctgatacgtagcctgcagggctaaaaatagcagagctaaaaatagctcggctaaaaatagcgacgctaaaaatagcctagctaaaaatagcactgctaaaaatagctgcgctaaaaatagcgtagctaaaaatagcggcgcgccatgcttcatcagactct

SEQ ID NO: 5943 - DNA, 188 bp, Artificial Sequence; identical to SEQ ID NO: 5942
  Synthetic polynucleotide

SEQ ID NO: 5944 - DNA, 197 bp, Artificial Sequence
  Synthetic polynucleotide
atcatctcaccttgcctcctggcgtgtgttaccatgagcctgcaggcggaaccggaagtggagacggaaccggaagtggtcgcggaaccggaagtgggaccggaaccggaagtggctacggaaccggaagtggactcggaaccggaagtggtgccggaaccggaagtgggtaggcgcgccatgcttcatcagactct

SEQ ID NO: 5945 - DNA, 197 bp, Artificial Sequence; identical to SEQ ID NO: 5944
  Synthetic polynucleotide

SEQ ID NO: 5946 - DNA, 190 bp, Artificial Sequence
  Synthetic polynucleotide
atcatctcaccttgcctcctgtacaaagtcgctgtcatcctgcaggttctagaactttctagattctagaactttcttcgttctagaactttctgacttctagaactttctctattctagaactttctactttctagaactttcttgcttctagaactttctgtaggcgcgccatgcttcatcagactct

SEQ ID NO: 5947 - DNA, 190 bp, Artificial Sequence; identical to SEQ ID NO: 5946
  Synthetic polynucleotide

SEQ ID NO: 5948 - DNA, 172 bp, Artificial Sequence
  Synthetic polynucleotide
atcatctcaccttgcctcctgtatggacgacttacgaccctgcaggtgtaattatcagatgtaattatctcgtgtaattatcgactgtaattatcctatgtaattatcacttgtaattatctgctgtaattatcgtatgtaattatcggcgcgccatgcttcatcagactct

SEQ ID NO: 5949 - DNA, 172 bp, Artificial Sequence; identical to SEQ ID NO: 5948
  Synthetic polynucleotide

SEQ ID NO: 5950 - DNA, 197 bp, Artificial Sequence
  Synthetic polynucleotide
atcatctcaccttgcctcctgccgacgctgttaggaaccctgcaggcaaaccacaaaccccagacaaaccacaaacccctcgcaaaccacaaaccccgaccaaaccacaaaccccctacaaaccacaaaccccactcaaaccacaaacccctgccaaaccacaaaccccgtaggcgcgccatgcttcatcagactct

SEQ ID NO: 5951 - DNA, 197 bp, Artificial Sequence; identical to SEQ ID NO: 5950
  Synthetic polynucleotide

SEQ ID NO: 5952 - DNA, 172 bp, Artificial Sequence
  Synthetic polynucleotide
atcatctcaccttgcctcctgtcctacgaatagcgtctcctgcaggattcatgtgcagaattcatgtgctcgattcatgtgcgacattcatgtgcctaattcatgtgcactattcatgtgctgcattcatgtgcgtaattcatgtgcggcgcgccatgcttcatcagactct

SEQ ID NO: 5953 - DNA, 172 bp, Artificial Sequence; identical to SEQ ID NO: 5952
  Synthetic polynucleotide

SEQ ID NO: 5954 - DNA, 156 bp, Artificial Sequence
  Synthetic polynucleotide
atcatctcaccttgcctcctggccgaatagaactctctcctgcaggactttcacagaactttcactcgactttcacgacactttcacctaactttcacactactttcactgcactttcacgtaactttcacggcgcgccatgcttcatcagactct

SEQ ID NO: 5955 - DNA, 156 bp, Artificial Sequence; identical to SEQ ID NO: 5954
  Synthetic polynucleotide

SEQ ID NO: 5956 - DNA, 188 bp, Artificial Sequence
  Synthetic polynucleotide
atcatctcaccttgcctcctggttagatcatcagccttcctgcagggcgatcaccccaagagcgatcaccccatcggcgatcaccccagacgcgatcaccccactagcgatcaccccaactgcgatcaccccatgcgcgatcaccccagtagcgatcaccccaggcgcgccatgcttcatcagactct

SEQ ID NO: 5957 - DNA, 188 bp, Artificial Sequence; identical to SEQ ID NO: 5956
  Synthetic polynucleotide

SEQ ID NO: 5958 - DNA, 188 bp, Artificial Sequence
  Synthetic polynucleotide
atcatctcaccttgcctcctgtacagataggctctggccctgcagggtttgggaatacagagtttgggaatactcggtttgggaatacgacgtttgggaatacctagtttgggaatacactgtttgggaatactgcgtttgggaatacgtagtttgggaatacggcgcgccatgcttcatcagactct

SEQ ID NO: 5959 - DNA, 188 bp, Artificial Sequence; identical to SEQ ID NO: 5958
  Synthetic polynucleotide

SEQ ID NO: 5960 - DNA, 156 bp, Artificial Sequence
  Synthetic polynucleotide
atcatctcaccttgcctcctgcagtttatagggcttaacctgcaggataatcccagaataatccctcgataatcccgacataatcccctaataatcccactataatccctgcataatcccgtaataatcccggcgcgccatgcttcatcagactct

SEQ ID NO: 5961 - DNA, 156 bp, Artificial Sequence; identical to SEQ ID NO: 5960
  Synthetic polynucleotide

SEQ ID NO: 5962 - DNA, 172 bp, Artificial Sequence
  Synthetic polynucleotide
atcatctcaccttgcctcctgggttacgtctgacacgtcctgcaggtccccggggaagatccccggggatcgtccccggggagactccccggggactatccccggggaacttccccggggatgctccccggggagtatccccggggaggcgcgccatgcttcatcagactct

SEQ ID NO: 5963 - DNA, 172 bp, Artificial Sequence; identical to SEQ ID NO: 5962
  Synthetic polynucleotide

SEQ ID NO: 5964 - DNA, 196 bp, Artificial Sequence
  Synthetic polynucleotide
atcatctcaccttgcctcctgattagtagcgtcctattcctgcaggcggccaaaatgacagacggccaaaatgactcgcggccaaaatgacgaccggccaaaatgacctacggccaaaatgacactcggccaaaatgactgccggccaaaatgacgtacggccaaaatgacggcgcgccatgcttcatcagactct

SEQ ID NO: 5965 - DNA, 196 bp, Artificial Sequence; identical to SEQ ID NO: 5964
  Synthetic polynucleotide

SEQ ID NO: 5966 - DNA, 197 bp, Artificial Sequence
  Synthetic polynucleotide
atcatctcaccttgcctcctgttctctgtcggacaagacctgcaggttgaatgtttatttataaagattgaatgtttatttataatcgttgaatgtttatttataagacttgaatgtttatttataactattgaatgtttatttataaactttgaatgtttatttataatgcggcgcgccatgcttcatcagactct

SEQ ID NO: 5967 - DNA, 197 bp, Artificial Sequence; identical to SEQ ID NO: 5966
  Synthetic polynucleotide

SEQ ID NO: 5968 - DNA, 197 bp, Artificial Sequence
  Synthetic polynucleotide
atcatctcaccttgcctcctgtacatcctagggagatacctgcagggcaatcacttcctgtagagcaatcacttcctgttcggcaatcacttcctgtgacgcaatcacttcctgtctagcaatcacttcctgtactgcaatcacttcctgttgcgcaatcacttcctgtgtaggcgcgccatgcttcatcagactct

SEQ ID NO: 5969 - DNA, 197 bp, Artificial Sequence; identical to SEQ ID NO: 5968
  Synthetic polynucleotide

SEQ ID NO: 5970 - DNA, 190 bp, Artificial Sequence
  Synthetic polynucleotide
atcatctcaccttgcctcctgccgacagttattctgtacctgcaggaatatgcaaattatagaaatatgcaaattattcgaatatgcaaattatgacaatatgcaaattatctaaatatgcaaattatactaatatgcaaattattgcaatatgcaaattatgtaggcgcgccatgcttcatcagactct

SEQ ID NO: 5971 - DNA, 190 bp, Artificial Sequence; identical to SEQ ID NO: 5970
  Synthetic polynucleotide

SEQ ID NO: 5972 - DNA, 191 bp, Artificial Sequence
  Synthetic polynucleotide
atcatctcaccttgcctcctgactgggaggaataacatcctgcaggacattcctcgcattccaagaacattcctcgcattccatcgacattcctcgcattccagacacattcctcgcattccactaacattcctcgcattccaactacattcctcgcattccatgcggcgcgccatgcttcatcagactct

SEQ ID NO: 5973 - DNA, 191 bp, Artificial Sequence; identical to SEQ ID NO: 5972
  Synthetic polynucleotide

SEQ ID NO: 5974 - DNA, 172 bp, Artificial Sequence
  Synthetic polynucleotide
atcatctcaccttgcctcctgctacgaagattatctctcctgcaggttctgattggagattctgattggtcgttctgattgggacttctgattggctattctgattggactttctgattggtgcttctgattgggtattctgattggggcgcgccatgcttcatcagactct

SEQ ID NO: 5975 - DNA, 172 bp, Artificial Sequence; identical to SEQ ID NO: 5974
  Synthetic polynucleotide

SEQ ID NO: 5976 - DNA, 197 bp, Artificial Sequence
  Synthetic polynucleotide
atcatctcaccttgcctcctgaagtccgcgcctatgagcctgcaggtctcacgcaagcccggggagatctcacgcaagcccggggtcgtctcacgcaagcccgggggactctcacgcaagcccggggctatctcacgcaagcccggggacttctcacgcaagcccggggtgcggcgcgccatgcttcatcagactct

SEQ ID NO: 5977 - DNA, 197 bp, Artificial Sequence; identical to SEQ ID NO: 5976
  Synthetic polynucleotide

SEQ ID NO: 5978 - DNA, 180 bp, Artificial Sequence
  Synthetic polynucleotide
atcatctcaccttgcctcctggcgtgtagttgcgatctcctgcaggtcaagcgtgaaagatcaagcgtgaatcgtcaagcgtgaagactcaagcgtgaactatcaagcgtgaaacttcaagcgtgaatgctcaagcgtgaagtatcaagcgtgaaggcgcgccatgcttcatcagactct

SEQ ID NO: 5979 - DNA, 180 bp, Artificial Sequence; identical to SEQ ID NO: 5978
  Synthetic polynucleotide

SEQ ID NO: 5980 - DNA, 196 bp, Artificial Sequence
  Synthetic polynucleotide
atcatctcaccttgcctcctggctgagggttacgtagtcctgcaggtttcccagaaaagagatttcccagaaaagtcgtttcccagaaaaggactttcccagaaaagctatttcccagaaaagacttttcccagaaaagtgctttcccagaaaaggtatttcccagaaaagggcgcgccatgcttcatcagactct

SEQ ID NO: 5981 - DNA, 196 bp, Artificial Sequence; identical to SEQ ID NO: 5980
  Synthetic polynucleotide

SEQ ID NO: 5982 - DNA, 191 bp, Artificial Sequence
  Synthetic polynucleotide
atcatctcaccttgcctcctggagagcaaagagacagtcctgcaggagtagttaattagttacagaagtagttaattagttactcgagtagttaattagttacgacagtagttaattagttacctaagtagttaattagttacactagtagttaattagttactgcggcgcgccatgcttcatcagactct

SEQ ID NO: 5983 - DNA, 191 bp, Artificial Sequence; identical to SEQ ID NO: 5982
  Synthetic polynucleotide

SEQ ID NO: 5984 - DNA, 196 bp, Artificial Sequence
  Synthetic polynucleotide
atcatctcaccttgcctcctggactgaaagaagttaaccctgcaggatgaccttgatatagaatgaccttgatattcgatgaccttgatatgacatgaccttgatatctaatgaccttgatatactatgaccttgatattgcatgaccttgatatgtaatgaccttgatatggcgcgccatgcttcatcagactct

SEQ ID NO: 5985 - DNA, 196 bp, Artificial Sequence; identical to SEQ ID NO: 5984
  Synthetic polynucleotide

SEQ ID NO: 5986 - DNA, 197 bp, Artificial Sequence
  Synthetic polynucleotide
atcatctcaccttgcctcctgccaataggagcagttcgcctgcaggtggggggggcagataaggagatggggggggcagataaggtcgtggggggggcagataagggactggggggggcagataaggctatggggggggcagataaggacttggggggggcagataaggtgcggcgcgccatgcttcatcagactct

SEQ ID NO: 5987 - DNA, 197 bp, Artificial Sequence; identical to SEQ ID NO: 5986
  Synthetic polynucleotide

SEQ ID NO: 5988 - DNA, 196 bp, Artificial Sequence
  Synthetic polynucleotide
atcatctcaccttgcctcctgcggctttggccagtatgcctgcaggaaaaacaaacaacagaaaaaacaaacaactcgaaaaacaaacaacgacaaaaacaaacaacctaaaaaacaaacaacactaaaaacaaacaactgcaaaaacaaacaacgtaaaaaacaaacaacggcgcgccatgcttcatcagactct

SEQ ID NO: 5989 - DNA, 196 bp, Artificial Sequence; identical to SEQ ID NO: 5988
  Synthetic polynucleotide

SEQ ID NO: 5990 - DNA, 185 bp, Artificial Sequence
  Synthetic polynucleotide
atcatctcaccttgcctcctgagacgctagctatctgtcctgcaggtcacacctaggtgtgaagatcacacctaggtgtgatcgtcacacctaggtgtgagactcacacctaggtgtgactatcacacctaggtgtgaacttcacacctaggtgtgatgcggcgcgccatgcttcatcagactct

SEQ ID NO: 5991 - DNA, 185 bp, Artificial Sequence; identical to SEQ ID NO: 5990
  Synthetic polynucleotide

SEQ ID NO: 5992 - DNA, 156 bp, Artificial Sequence
  Synthetic polynucleotide
atcatctcaccttgcctcctgaaccctactttcgcacacctgcaggtgggatggagatgggatggtcgtgggatgggactgggatggctatgggatggacttgggatggtgctgggatgggtatgggatggggcgcgccatgcttcatcagactct

SEQ ID NO: 5993 - DNA, 156 bp, Artificial Sequence; identical to SEQ ID NO: 5992
  Synthetic polynucleotide

SEQ ID NO: 5994 - DNA, 156 bp, Artificial Sequence
  Synthetic polynucleotide
atcatctcaccttgcctcctggatccagtatcggtgttcctgcaggcgccctctagacgccctcttcgcgccctctgaccgccctctctacgccctctactcgccctcttgccgccctctgtacgccctctggcgcgccatgcttcatcagactct

SEQ ID NO: 5995 - DNA, 156 bp, Artificial Sequence; identical to SEQ ID NO: 5994
  Synthetic polynucleotide

SEQ ID NO: 5996 - DNA, 191 bp, Artificial Sequence
  Synthetic polynucleotide
atcatctcaccttgcctcctgttccatttggagccacacctgcaggaaacaatgcaattgtttagaaaacaatgcaattgttttcgaaacaatgcaattgtttgacaaacaatgcaattgtttctaaaacaatgcaattgtttactaaacaatgcaattgttttgcggcgcgccatgcttcatcagactct

SEQ ID NO: 5997 - DNA, 191 bp, Artificial Sequence; identical to SEQ ID NO: 5996
  Synthetic polynucleotide

SEQ ID NO: 5998 - DNA, 197 bp, Artificial Sequence
  Synthetic polynucleotide
atcatctcaccttgcctcctgcctcagtgctttgtgcccctgcaggagcaccatggacagcagaagcaccatggacagctcgagcaccatggacagcgacagcaccatggacagcctaagcaccatggacagcactagcaccatggacagctgcagcaccatggacagcgtaggcgcgccatgcttcatcagactct

SEQ ID NO: 5999 - DNA, 197 bp, Artificial Sequence; identical to SEQ ID NO: 5998
  Synthetic polynucleotide

SEQ ID NO: 6000 - DNA, 164 bp, Artificial Sequence
  Synthetic polynucleotide
atcatctcaccttgcctcctgatatgagctggtacacacctgcaggttttgttttagattttgtttttcgttttgttttgacttttgttttctattttgttttactttttgtttttgcttttgttttgtattttgttttggcgcgccatgcttcatcagactct

SEQ ID NO: 6001 - DNA, 164 bp, Artificial Sequence; identical to SEQ ID NO: 6000
  Synthetic polynucleotide

SEQ ID NO: 6002 - DNA, 172 bp, Artificial Sequence
  Synthetic polynucleotide
atcatctcaccttgcctcctgatgtccaataccactgacctgcaggccccgcgcccagaccccgcgccctcgccccgcgcccgacccccgcgcccctaccccgcgcccactccccgcgccctgcccccgcgcccgtaccccgcgcccggcgcgccatgcttcatcagactct

SEQ ID NO: 6003 - DNA, 172 bp, Artificial Sequence; identical to SEQ ID NO: 6002
  Synthetic polynucleotide

SEQ ID NO: 6004 - DNA, 196 bp, Artificial Sequence
  Synthetic polynucleotide
atcatctcaccttgcctcctgacataccgacgtcccgacctgcagggcaaggcattctgggaagtgtaagagcaaggcattctgggaagtgtatcggcaaggcattctgggaagtgtagacgcaaggcattctgggaagtgtactagcaaggcattctgggaagtgtaactggcgcgccatgcttcatcagactct

SEQ ID NO: 6005 - DNA, 196 bp, Artificial Sequence; identical to SEQ ID NO: 6004
  Synthetic polynucleotide

SEQ ID NO: 6006 - DNA, 188 bp, Artificial Sequence
  Synthetic polynucleotide
atcatctcaccttgcctcctgcaaccctttatcgggctcctgcaggtaatttgcataaagataatttgcataatcgtaatttgcataagactaatttgcataactataatttgcataaacttaatttgcataatgctaatttgcataagtataatttgcataaggcgcgccatgcttcatcagactct

SEQ ID NO: 6007 - DNA, 188 bp, Artificial Sequence; identical to SEQ ID NO: 6006
  Synthetic polynucleotide

SEQ ID NO: 6008 - DNA, 156 bp, Artificial Sequence
  Synthetic polynucleotide
atcatctcaccttgcctcctgccgctttagcatccaaccctgcaggaccaattaagaaccaattatcgaccaattagacaccaattactaaccaattaactaccaattatgcaccaattagtaaccaattaggcgcgccatgcttcatcagactct

SEQ ID NO: 6009 - DNA, 156 bp, Artificial Sequence; identical to SEQ ID NO: 6008
  Synthetic polynucleotide

SEQ ID NO: 6010 - DNA, 196 bp, Artificial Sequence
  Synthetic polynucleotide
atcatctcaccttgcctcctgatccatcgttgacagatcctgcagggaacatctggatgagagaacatctggatgtcggaacatctggatggacgaacatctggatgctagaacatctggatgactgaacatctggatgtgcgaacatctggatggtagaacatctggatgggcgcgccatgcttcatcagactct

SEQ ID NO: 6011 - DNA, 196 bp, Artificial Sequence; identical to SEQ ID NO: 6010
  Synthetic polynucleotide

SEQ ID NO: 6012 - DNA, 148 bp, Artificial Sequence
  Synthetic polynucleotide
atcatctcaccttgcctcctgttacggtcgtagcgtatcctgcaggcaataaaagacaataaatcgcaataaagaccaataaactacaataaaactcaataaatgccaataaagtacaataaaggcgcgccatgcttcatcagactct

SEQ ID NO: 6013 - DNA, 148 bp, Artificial Sequence; identical to SEQ ID NO: 6012
  Synthetic polynucleotide

SEQ ID NO: 6014 - DNA, 156 bp, Artificial Sequence
  Synthetic polynucleotide
atcatctcaccttgcctcctgctctttactaccgcctgcctgcagggccatctgagagccatctgtcggccatctggacgccatctgctagccatctgactgccatctgtgcgccatctggtagccatctgggcgcgccatgcttcatcagactct

SEQ ID NO: 6015 - DNA, 156 bp, Artificial Sequence; identical to SEQ ID NO: 6014
  Synthetic polynucleotide

SEQ ID NO: 6016 - DNA, 172 bp, Artificial Sequence
  Synthetic polynucleotide
atcatctcaccttgcctcctggagggtacaggtgagatcctgcaggtatgagtcatagatatgagtcattcgtatgagtcatgactatgagtcatctatatgagtcatacttatgagtcattgctatgagtcatgtatatgagtcatggcgcgccatgcttcatcagactct

SEQ ID NO: 6017 - DNA, 172 bp, Artificial Sequence; identical to SEQ ID NO: 6016
  Synthetic polynucleotide

SEQ ID NO: 6018 - DNA, 197 bp, Artificial Sequence
  Synthetic polynucleotide
atcatctcaccttgcctcctggtctaaggcgaatacaacctgcaggtctcgatatgactcaagatctcgatatgactcatcgtctcgatatgactcagactctcgatatgactcactatctcgatatgactcaacttctcgatatgactcatgctctcgatatgactcagtaggcgcgccatgcttcatcagactct

SEQ ID NO: 6019 - DNA, 197 bp, Artificial Sequence; identical to SEQ ID NO: 6018
  Synthetic polynucleotide

SEQ ID NO: 6020 - DNA, 197 bp, Artificial Sequence
  Synthetic polynucleotide
atcatctcaccttgcctcctgtaatgcaaacgacctgtcctgcaggaacaaacaacaagagagaaacaaacaacaagagtcgaacaaacaacaagaggacaacaaacaacaagagctaaacaaacaacaagagactaacaaacaacaagagtgcaacaaacaacaagaggtaggcgcgccatgcttcatcagactct

SEQ ID NO: 6021 - DNA, 197 bp, Artificial Sequence; identical to SEQ ID NO: 6020
  Synthetic polynucleotide

SEQ ID NO: 6022 - DNA, 148 bp, Artificial Sequence
  Synthetic polynucleotide
atcatctcaccttgcctcctgtagcttatcagtggtcccctgcaggtgacctcagatgacctctcgtgacctcgactgacctcctatgacctcacttgacctctgctgacctcgtatgacctcggcgcgccatgcttcatcagactct

SEQ ID NO: 6023 - DNA, 148 bp, Artificial Sequence; identical to SEQ ID NO: 6022
  Synthetic polynucleotide

SEQ ID NO: 6024 - DNA, 186 bp, Artificial Sequence
  Synthetic polynucleotide
atcatctcaccttgcctcctgaggtctccgcttattaacctgcaggaggtgtgaaaaaaggtgtgaagaaggtgtgaaaaaaggtgtgatcgaggtgtgaaaaaaggtgtgagacaggtgtgaaaaaaggtgtgactaaggtgtgaaaaaaggtgtgaactggcgcgccatgcttcatcagactct

SEQ ID NO: 6025 - DNA, 186 bp, Artificial Sequence; identical to SEQ ID NO: 6024
  Synthetic polynucleotide

SEQ ID NO: 6026 - DNA, 164 bp, Artificial Sequence
  Synthetic polynucleotide
atcatctcaccttgcctcctgcctgaaataagaagtgccctgcaggaccacctggagaaccacctggtcgaccacctgggacaccacctggctaaccacctggactaccacctggtgcaccacctgggtaaccacctggggcgcgccatgcttcatcagactct

SEQ ID NO: 6027 - DNA, 164 bp, Artificial Sequence; identical to SEQ ID NO: 6026
  Synthetic polynucleotide

SEQ ID NO: 6028 - DNA, 164 bp, Artificial Sequence
  Synthetic polynucleotide
atcatctcaccttgcctcctgttgtggatgagcattggcctgcaggttttatgggagattttatgggtcgttttatggggacttttatgggctattttatgggactttttatgggtgcttttatggggtattttatgggggcgcgccatgcttcatcagactct

SEQ ID NO: 6029 - DNA, 164 bp, Artificial Sequence; identical to SEQ ID NO: 6028
  Synthetic polynucleotide

SEQ ID NO: 6030 - DNA, 180 bp, Artificial Sequence
  Synthetic polynucleotide
atcatctcaccttgcctcctgtaacctccattcaacggcctgcaggaaccgaaaccaagaaaccgaaaccatcgaaccgaaaccagacaaccgaaaccactaaaccgaaaccaactaaccgaaaccatgcaaccgaaaccagtaaaccgaaaccaggcgcgccatgcttcatcagactct

SEQ ID NO: 6031 - DNA, 180 bp, Artificial Sequence; identical to SEQ ID NO: 6030
  Synthetic polynucleotide

SEQ ID NO: 6032 - DNA, 164 bp, Artificial Sequence
  Synthetic polynucleotide
atcatctcaccttgcctcctgcgcaatattccatatgccctgcaggtttgcgtaaagatttgcgtaatcgtttgcgtaagactttgcgtaactatttgcgtaaacttttgcgtaatgctttgcgtaagtatttgcgtaaggcgcgccatgcttcatcagactct

SEQ ID NO: 6033 - DNA, 164 bp, Artificial Sequence; identical to SEQ ID NO: 6032
  Synthetic polynucleotide

SEQ ID NO: 6034 - DNA, 191 bp, Artificial Sequence
  Synthetic polynucleotide
atcatctcaccttgcctcctgtgctcgaggtagacgtccctgcagggaggtcaaaaggtcacaagagaggtcaaaaggtcacatcggaggtcaaaaggtcacagacgaggtcaaaaggtcacactagaggtcaaaaggtcacaactgaggtcaaaaggtcacatgcggcgcgccatgcttcatcagactct

SEQ ID NO: 6035 - DNA, 191 bp, Artificial Sequence; identical to SEQ ID NO: 6034
  Synthetic polynucleotide

SEQ ID NO: 6036 - DNA, 196 bp, Artificial Sequence
  Synthetic polynucleotide
atcatctcaccttgcctcctgacttatgtagctcctgtcctgcaggtgacagctgtcaaagatgacagctgtcaatcgtgacagctgtcaagactgacagctgtcaactatgacagctgtcaaacttgacagctgtcaatgctgacagctgtcaagtatgacagctgtcaaggcgcgccatgcttcatcagactct

SEQ ID NO: 6037 - DNA, 196 bp, Artificial Sequence; identical to SEQ ID NO: 6036
  Synthetic polynucleotide

SEQ ID NO: 6038 - DNA, 197 bp, Artificial Sequence
  Synthetic polynucleotide
atcatctcaccttgcctcctgaataggaggaagtgggtcctgcaggtgcgcatgcgcagtgagatgcgcatgcgcagtgtcgtgcgcatgcgcagtggactgcgcatgcgcagtgctatgcgcatgcgcagtgacttgcgcatgcgcagtgtgctgcgcatgcgcagtggtaggcgcgccatgcttcatcagactct

SEQ ID NO: 6039 - DNA, 197 bp, Artificial Sequence; identical to SEQ ID NO: 6038
  Synthetic polynucleotide

SEQ ID NO: 6040 - DNA, 172 bp, Artificial Sequence
  Synthetic polynucleotide
atcatctcaccttgcctcctgatttcggttcacttctacctgcagggcatgacctcagagcatgacctctcggcatgacctcgacgcatgacctcctagcatgacctcactgcatgacctctgcgcatgacctcgtagcatgacctcggcgcgccatgcttcatcagactct

SEQ ID NO: 6041 - DNA, 172 bp, Artificial Sequence; identical to SEQ ID NO: 6040
  Synthetic polynucleotide

SEQ ID NO: 6042 - DNA, 185 bp, Artificial Sequence
  Synthetic polynucleotide
atcatctcaccttgcctcctgccttagtgaaactcacccctgcaggcagagctaattaccccagacagagctaattacccctcgcagagctaattaccccgaccagagctaattaccccctacagagctaattaccccactcagagctaattacccctgcggcgcgccatgcttcatcagactct

SEQ ID NO: 6043 - DNA, 185 bp, Artificial Sequence; identical to SEQ ID NO: 6042
  Synthetic polynucleotide

SEQ ID NO: 6044 - DNA, 190 bp, Artificial Sequence
  Synthetic polynucleotide
atcatctcaccttgcctcctggccacgagaatgttcttcctgcaggatggaaaattacagagaatggaaaattacagtcgatggaaaattacaggacatggaaaattacagctaatggaaaattacagactatggaaaattacagtgcatggaaaattacaggtaggcgcgccatgcttcatcagactct

SEQ ID NO: 6045 - DNA, 190 bp, Artificial Sequence; identical to SEQ ID NO: 6044
  Synthetic polynucleotide

SEQ ID NO: 6046 - DNA, 148 bp, Artificial Sequence
  Synthetic polynucleotide
atcatctcaccttgcctcctgtaagccctcataaagtccctgcaggaattaaaagaaattaaatcgaattaaagacaattaaactaaattaaaactaattaaatgcaattaaagtaaattaaaggcgcgccatgcttcatcagactct

SEQ ID NO: 6047 - DNA, 148 bp, Artificial Sequence; identical to SEQ ID NO: 6046
  Synthetic polynucleotide

SEQ ID NO: 6048 - DNA, 164 bp, Artificial Sequence
  Synthetic polynucleotide
atcatctcaccttgcctcctgtttaacggcatgtttctcctgcaggaccacctgtagaaccacctgttcgaccacctgtgacaccacctgtctaaccacctgtactaccacctgttgcaccacctgtgtaaccacctgtggcgcgccatgcttcatcagactct

SEQ ID NO: 6049 - DNA, 164 bp, Artificial Sequence; identical to SEQ ID NO: 6048
  Synthetic polynucleotide

SEQ ID NO: 6050 - DNA, 172 bp, Artificial Sequence
  Synthetic polynucleotide
atcatctcaccttgcctcctggacctggttcgaggttccctgcaggcgcgcgcgcgagacgcgcgcgcgtcgcgcgcgcgcggaccgcgcgcgcgctacgcgcgcgcgactcgcgcgcgcgtgccgcgcgcgcggtacgcgcgcgcgggcgcgccatgcttcatcagactct

SEQ ID NO: 6051 - DNA, 172 bp, Artificial Sequence; identical to SEQ ID NO: 6050
  Synthetic polynucleotide

SEQ ID NO: 6052 - DNA, 188 bp, Artificial Sequence
  Synthetic polynucleotide
atcatctcaccttgcctcctggggcacaagccacgaatcctgcaggagcctgtctgccagaagcctgtctgcctcgagcctgtctgccgacagcctgtctgccctaagcctgtctgccactagcctgtctgcctgcagcctgtctgccgtaagcctgtctgccggcgcgccatgcttcatcagactct

SEQ ID NO: 6053 - DNA, 188 bp, Artificial Sequence; identical to SEQ ID NO: 6052
  Synthetic polynucleotide

SEQ ID NO: 6054 - DNA, 172 bp, Artificial Sequence
  Synthetic polynucleotide
atcatctcaccttgcctcctgacgtcaccattggtaagcctgcaggattttccattagaattttccatttcgattttccattgacattttccattctaattttccattactattttccatttgcattttccattgtaattttccattggcgcgccatgcttcatcagactct

SEQ ID NO: 6055 - DNA, 172 bp, Artificial Sequence; identical to SEQ ID NO: 6054
  Synthetic polynucleotide

SEQ ID NO: 6056 - DNA, 172 bp, Artificial Sequence
  Synthetic polynucleotide
atcatctcaccttgcctcctgtattatcaaagccgcctcctgcaggtgtcaatattagatgtcaatatttcgtgtcaatattgactgtcaatattctatgtcaatattacttgtcaatatttgctgtcaatattgtatgtcaatattggcgcgccatgcttcatcagactct

SEQ ID NO: 6057 - DNA, 172 bp, Artificial Sequence; identical to SEQ ID NO: 6056
  Synthetic polynucleotide

SEQ ID NO: 6058 - DNA, 190 bp, Artificial Sequence
  Synthetic polynucleotide
atcatctcaccttgcctcctggcttaggcaatggttagcctgcaggctgtaattttccatagactgtaattttccattcgctgtaattttccatgacctgtaattttccatctactgtaattttccatactctgtaattttccattgcctgtaattttccatgtaggcgcgccatgcttcatcagactct

SEQ ID NO: 6059 - DNA, 190 bp, Artificial Sequence; identical to SEQ ID NO: 6058
  Synthetic polynucleotide

SEQ ID NO: 6060 - DNA, 156 bp, Artificial Sequence
  Synthetic polynucleotide
atcatctcaccttgcctcctgaaggttcgaaggaggtacctgcaggttgatacaagattgatacatcgttgatacagacttgatacactattgatacaactttgatacatgcttgatacagtattgatacaggcgcgccatgcttcatcagactct

SEQ ID NO: 6061 - DNA, 156 bp, Artificial Sequence; identical to SEQ ID NO: 6060
  Synthetic polynucleotide

SEQ ID NO: 6062 - DNA, 172 bp, Artificial Sequence
  Synthetic polynucleotide
atcatctcaccttgcctcctgacaatcactctgggatgcctgcaggcaggaagtagagacaggaagtagtcgcaggaagtaggaccaggaagtagctacaggaagtagactcaggaagtagtgccaggaagtaggtacaggaagtagggcgcgccatgcttcatcagactct

SEQ ID NO: 6063 - DNA, 172 bp, Artificial Sequence; identical to SEQ ID NO: 6062
  Synthetic polynucleotide

SEQ ID NO: 6064 - DNA, 197 bp, Artificial Sequence
  Synthetic polynucleotide
atcatctcaccttgcctcctgcgtcttccaggacatgacctgcaggggggtcaaaggtcacagaggggtcaaaggtcactcgggggtcaaaggtcacgacggggtcaaaggtcacctaggggtcaaaggtcacactggggtcaaaggtcactgcggggtcaaaggtcacgtaggcgcgccatgcttcatcagactct

SEQ ID NO: 6065 - DNA, 197 bp, Artificial Sequence; identical to SEQ ID NO: 6064
  Synthetic polynucleotide

SEQ ID NO: 6066 - DNA, 148 bp, Artificial Sequence
  Synthetic polynucleotide
atcatctcaccttgcctcctggatgcctggaagcagagcctgcaggtgactttagatgacttttcgtgactttgactgactttctatgactttacttgacttttgctgactttgtatgactttggcgcgccatgcttcatcagactct

SEQ ID NO: 6067 - DNA, 148 bp, Artificial Sequence; identical to SEQ ID NO: 6066
  Synthetic polynucleotide

SEQ ID NO: 6068 - DNA, 190 bp, Artificial Sequence
  Synthetic polynucleotide
atcatctcaccttgcctcctggtcgtgggcgataagaccctgcaggacagggagtgagtgagaacagggagtgagtgtcgacagggagtgagtggacacagggagtgagtgctaacagggagtgagtgactacagggagtgagtgtgcacagggagtgagtggtaggcgcgccatgcttcatcagactct

SEQ ID NO: 6069 - DNA, 190 bp, Artificial Sequence; identical to SEQ ID NO: 6068
  Synthetic polynucleotide

SEQ ID NO: 6070 - DNA, 197 bp, Artificial Sequence
  Synthetic polynucleotide
atcatctcaccttgcctcctgagtccactgcaagcaaccctgcaggatgccctgaggcagtagaatgccctgaggcagttcgatgccctgaggcagtgacatgccctgaggcagtctaatgccctgaggcagtactatgccctgaggcagttgcatgccctgaggcagtgtaggcgcgccatgcttcatcagactct

SEQ ID NO: 6071 - DNA, 197 bp, Artificial Sequence; identical to SEQ ID NO: 6070
  Synthetic polynucleotide

SEQ ID NO: 6072 - DNA, 190 bp, Artificial Sequence
  Synthetic polynucleotide
atcatctcaccttgcctcctgaagcgacccatacatcccctgcaggaaggggatttccaaagaaaggggatttccaatcgaaggggatttccaagacaaggggatttccaactaaaggggatttccaaactaaggggatttccaatgcaaggggatttccaagtaggcgcgccatgcttcatcagactct

SEQ ID NO: 6073 - DNA, 190 bp, Artificial Sequence; identical to SEQ ID NO: 6072
  Synthetic polynucleotide

SEQ ID NO: 6074 - DNA, 190 bp, Artificial Sequence
  Synthetic polynucleotide
atcatctcaccttgcctcctgcaatgtttctggtcacccctgcagggtcgtgtggggaaaagagtcgtgtggggaaatcggtcgtgtggggaaagacgtcgtgtggggaaactagtcgtgtggggaaaactgtcgtgtggggaaatgcgtcgtgtggggaaagtaggcgcgccatgcttcatcagactct

SEQ ID NO: 6075 - DNA, 190 bp, Artificial Sequence; identical to SEQ ID NO: 6074
  Synthetic polynucleotide

SEQ ID NO: 6076 - DNA, 197 bp, Artificial Sequence
  Synthetic polynucleotide
atcatctcaccttgcctcctgcatagaactcggcggaccctgcaggcagtttcactttcccagacagtttcactttccctcgcagtttcactttcccgaccagtttcactttcccctacagtttcactttcccactcagtttcactttccctgccagtttcactttcccgtaggcgcgccatgcttcatcagactct

SEQ ID NO: 6077 - DNA, 197 bp, Artificial Sequence; identical to SEQ ID NO: 6076
  Synthetic polynucleotide

SEQ ID NO: 6078 - DNA, 197 bp, Artificial Sequence
  Synthetic polynucleotide
atcatctcaccttgcctcctgagagccacgtcatgacacctgcaggtaatgatgatcactaagataatgatgatcactatcgtaatgatgatcactagactaatgatgatcactactataatgatgatcactaacttaatgatgatcactatgctaatgatgatcactagtaggcgcgccatgcttcatcagactct

SEQ ID NO: 6079 - DNA, 197 bp, Artificial Sequence; identical to SEQ ID NO: 6078
  Synthetic polynucleotide

SEQ ID NO: 6080 - DNA, 180 bp, Artificial Sequence
  Synthetic polynucleotide
atcatctcaccttgcctcctgtatgcatcattacagcgcctgcaggagggagattccagaagggagattcctcgagggagattccgacagggagattccctaagggagattccactagggagattcctgcagggagattccgtaagggagattccggcgcgccatgcttcatcagactct

SEQ ID NO: 6081 - DNA, 180 bp, Artificial Sequence; identical to SEQ ID NO: 6080
  Synthetic polynucleotide

SEQ ID NO: 6082 - DNA, 191 bp, Artificial Sequence
  Synthetic polynucleotide
atcatctcaccttgcctcctgagttattacagaggtcgcctgcaggatgggatttccgggaaatgggagaatgggatttccgggaaatgggtcgatgggatttccgggaaatggggacatgggatttccgggaaatgggctaatgggatttccgggaaatgggactggcgcgccatgcttcatcagactct

SEQ ID NO: 6083 - DNA, 191 bp, Artificial Sequence; identical to SEQ ID NO: 6082
  Synthetic polynucleotide

SEQ ID NO: 6084 - DNA, 197 bp, Artificial Sequence
  Synthetic polynucleotide
atcatctcaccttgcctcctgctcaacacatcattggccctgcaggttcagtttcattttcagattcagtttcattttctcgttcagtttcattttcgacttcagtttcattttcctattcagtttcattttcactttcagtttcattttctgcttcagtttcattttcgtaggcgcgccatgcttcatcagactct

SEQ ID NO: 6085 - DNA, 197 bp, Artificial Sequence; identical to SEQ ID NO: 6084
  Synthetic polynucleotide

SEQ ID NO: 6086 - DNA, 200 bp, Artificial Sequence
  Synthetic polynucleotide
atcatctcaccttgcctcctgttagctaggttaacagccctgcagggtcacgcttggctgccctcagagtcacgcttggctgccctctcggtcacgcttggctgccctcgacgtcacgcttggctgccctcctagtcacgcttggctgccctcactgtcacgcttggctgccctcggcgcgccatgcttcatcagactct

SEQ ID NO: 6087 - DNA, 200 bp, Artificial Sequence; identical to SEQ ID NO: 6086
  Synthetic polynucleotide

SEQ ID NO: 6088 - DNA, 191 bp, Artificial Sequence
  Synthetic polynucleotide
atcatctcaccttgcctcctgcaatgtgcatataggcccctgcaggaattttcacgcatgagttcacagaaattttcacgcatgagttcactcgaattttcacgcatgagttcacgacaattttcacgcatgagttcacctaaattttcacgcatgagttcacactggcgcgccatgcttcatcagactct

SEQ ID NO: 6089 - DNA, 191 bp, Artificial Sequence; identical to SEQ ID NO: 6088
  Synthetic polynucleotide

SEQ ID NO: 6090 - DNA, 196 bp, Artificial Sequence
  Synthetic polynucleotide
atcatctcaccttgcctcctgcttgtgctaatgctcgccctgcagggggctcgtggcggagagggctcgtggcggtcggggctcgtggcgggacgggctcgtggcggctagggctcgtggcggactgggctcgtggcggtgcgggctcgtggcgggtagggctcgtggcggggcgcgccatgcttcatcagactct

SEQ ID NO: 6091 - DNA, 196 bp, Artificial Sequence; identical to SEQ ID NO: 6090
  Synthetic polynucleotide

SEQ ID NO: 6092 - DNA, 164 bp, Artificial Sequence
  Synthetic polynucleotide
atcatctcaccttgcctcctgttgggagcgctaccacacctgcaggctgagtcacagactgagtcactcgctgagtcacgacctgagtcacctactgagtcacactctgagtcactgcctgagtcacgtactgagtcacggcgcgccatgcttcatcagactct

SEQ ID NO: 6093 - DNA, 164 bp, Artificial Sequence; identical to SEQ ID NO: 6092
  Synthetic polynucleotide

SEQ ID NO: 6094 - DNA, 198 bp, Artificial Sequence
  Synthetic polynucleotide
atcatctcaccttgcctcctgcaagtctctgcagacatcctgcaggtcttttaatttgcataattatatagatcttttaatttgcataattatattcgtcttttaatttgcataattatatgactcttttaatttgcataattatatctatcttttaatttgcataattatatggcgcgccatgcttcatcagactct

SEQ ID NO: 6095 - DNA, 198 bp, Artificial Sequence; identical to SEQ ID NO: 6094
  Synthetic polynucleotide

SEQ ID NO: 6096 - DNA, 164 bp, Artificial Sequence
  Synthetic polynucleotide
atcatctcaccttgcctcctgaggtagctgtcagatctcctgcaggatttgcataagaatttgcatatcgatttgcatagacatttgcatactaatttgcataactatttgcatatgcatttgcatagtaatttgcataggcgcgccatgcttcatcagactct

SEQ ID NO: 6097 - DNA, 164 bp, Artificial Sequence; identical to SEQ ID NO: 6096
  Synthetic polynucleotide

SEQ ID NO: 6098 - DNA, 156 bp, Artificial Sequence
  Synthetic polynucleotide
atcatctcaccttgcctcctgggttagtttggtcgcgccctgcaggtctcccaaagatctcccaatcgtctcccaagactctcccaactatctcccaaacttctcccaatgctctcccaagtatctcccaaggcgcgccatgcttcatcagactct

SEQ ID NO: 6099 - DNA, 156 bp, Artificial Sequence; identical to SEQ ID NO: 6098
  Synthetic polynucleotide

SEQ ID NO: 6100 - DNA, 190 bp, Artificial Sequence
  Synthetic polynucleotide
atcatctcaccttgcctcctgtaaatcagtagaggcatcctgcaggatggcgcgtgccgcagaatggcgcgtgccgctcgatggcgcgtgccgcgacatggcgcgtgccgcctaatggcgcgtgccgcactatggcgcgtgccgctgcatggcgcgtgccgcgtaggcgcgccatgcttcatcagactct

SEQ ID NO: 6101 - DNA, 190 bp, Artificial Sequence; identical to SEQ ID NO: 6100
  Synthetic polynucleotide

SEQ ID NO: 6102 - DNA, 172 bp, Artificial Sequence
  Synthetic polynucleotide
atcatctcaccttgcctcctgctgataatccatgcccgcctgcaggaccagatgttagaaccagatgtttcgaccagatgttgacaccagatgttctaaccagatgttactaccagatgtttgcaccagatgttgtaaccagatgttggcgcgccatgcttcatcagactct

SEQ ID NO: 6103 - DNA, 172 bp, Artificial Sequence; identical to SEQ ID NO: 6102
  Synthetic polynucleotide

SEQ ID NO: 6104 - DNA, 191 bp, Artificial Sequence
  Synthetic polynucleotide
atcatctcaccttgcctcctgtccgacagacgcaacctcctgcaggggtgatttccgggaaatggggagaggtgatttccgggaaatggggtcgggtgatttccgggaaatgggggacggtgatttccgggaaatggggctaggtgatttccgggaaatggggactggcgcgccatgcttcatcagactct

SEQ ID NO: 6105 - DNA, 191 bp, Artificial Sequence; identical to SEQ ID NO: 6104
  Synthetic polynucleotide

SEQ ID NO: 6106 - DNA, 172 bp, Artificial Sequence
  Synthetic polynucleotide
atcatctcaccttgcctcctgcggtcatgatgagaacacctgcaggaatgtatcaaagaaatgtatcaatcgaatgtatcaagacaatgtatcaactaaatgtatcaaactaatgtatcaatgcaatgtatcaagtaaatgtatcaaggcgcgccatgcttcatcagactct

SEQ ID NO: 6107 - DNA, 172 bp, Artificial Sequence; identical to SEQ ID NO: 6106
  Synthetic polynucleotide

SEQ ID NO: 6108 - DNA, 180 bp, Artificial Sequence
  Synthetic polynucleotide
atcatctcaccttgcctcctgacaacacccgaaatatacctgcaggtctcgtaaaaaagatctcgtaaaaatcgtctcgtaaaaagactctcgtaaaaactatctcgtaaaaaacttctcgtaaaaatgctctcgtaaaaagtatctcgtaaaaaggcgcgccatgcttcatcagactct

SEQ ID NO: 6109 - DNA, 180 bp, Artificial Sequence; identical to SEQ ID NO: 6108
  Synthetic polynucleotide

SEQ ID NO: 6110 - DNA, 197 bp, Artificial Sequence
  Synthetic polynucleotide
atcatctcaccttgcctcctgccatgttccattctggtcctgcagggaaaatgaaactgaaagagaaaatgaaactgaatcggaaaatgaaactgaagacgaaaatgaaactgaactagaaaatgaaactgaaactgaaaatgaaactgaatgcgaaaatgaaactgaagtaggcgcgccatgcttcatcagactct

SEQ ID NO: 6111 - DNA, 197 bp, Artificial Sequence; identical to SEQ ID NO: 6110
  Synthetic polynucleotide

SEQ ID NO: 6112 - DNA, 190 bp, Artificial Sequence
  Synthetic polynucleotide
atcatctcaccttgcctcctggcgtcctgtatgaatggcctgcaggtatgaatattcaaaagatatgaatattcaaatcgtatgaatattcaaagactatgaatattcaaactatatgaatattcaaaacttatgaatattcaaatgctatgaatattcaaagtaggcgcgccatgcttcatcagactct

SEQ ID NO: 6113 - DNA, 190 bp, Artificial Sequence; identical to SEQ ID NO: 6112
  Synthetic polynucleotide

SEQ ID NO: 6114 - DNA, 190 bp, Artificial Sequence
  Synthetic polynucleotide
atcatctcaccttgcctcctgtaaccagcatgtccagtcctgcaggtatgtgttgtgggtagatatgtgttgtgggttcgtatgtgttgtgggtgactatgtgttgtgggtctatatgtgttgtgggtacttatgtgttgtgggttgctatgtgttgtgggtgtaggcgcgccatgcttcatcagactct

SEQ ID NO: 6115 - DNA, 190 bp, Artificial Sequence; identical to SEQ ID NO: 6114
  Synthetic polynucleotide

SEQ ID NO: 6116 - DNA, 172 bp, Artificial Sequence
  Synthetic polynucleotide
atcatctcaccttgcctcctgcgactgttgtcgactgccctgcagggtgaccttggagagtgaccttggtcggtgaccttgggacgtgaccttggctagtgaccttggactgtgaccttggtgcgtgaccttgggtagtgaccttggggcgcgccatgcttcatcagactct

SEQ ID NO: 6117 - DNA, 172 bp, Artificial Sequence; identical to SEQ ID NO: 6116
  Synthetic polynucleotide

SEQ ID NO: 6118 - DNA, 190 bp, Artificial Sequence
  Synthetic polynucleotide
atcatctcaccttgcctcctgtgacggccgaatagttccctgcagggtttcccgccatttagagtttcccgccattttcggtttcccgccatttgacgtttcccgccatttctagtttcccgccatttactgtttcccgccattttgcgtttcccgccatttgtaggcgcgccatgcttcatcagactct

SEQ ID NO: 6119 - DNA, 190 bp, Artificial Sequence; identical to SEQ ID NO: 6118
  Synthetic polynucleotide

SEQ ID NO: 6120 - DNA, 191 bp, Artificial Sequence
  Synthetic polynucleotide
atcatctcaccttgcctcctgtctcgatctggtgtcgacctgcaggtatcaataacattgataagatatcaataacattgatatcgtatcaataacattgatagactatcaataacattgatactatatcaataacattgataacttatcaataacattgatatgcggcgcgccatgcttcatcagactct

SEQ ID NO: 6121 - DNA, 191 bp, Artificial Sequence; identical to SEQ ID NO: 6120
  Synthetic polynucleotide

SEQ ID NO: 6122 - DNA, 164 bp, Artificial Sequence
  Synthetic polynucleotide
atcatctcaccttgcctcctgttaaacgggcaagtacgcctgcaggtgaccttgaagatgaccttgatcgtgaccttgagactgaccttgactatgaccttgaacttgaccttgatgctgaccttgagtatgaccttgaggcgcgccatgcttcatcagactct

SEQ ID NO: 6123 - DNA, 164 bp, Artificial Sequence; identical to SEQ ID NO: 6122
  Synthetic polynucleotide

SEQ ID NO: 6124 - DNA, 156 bp, Artificial Sequence
  Synthetic polynucleotide
atcatctcaccttgcctcctgccactgctaataatcggcctgcaggtccggggtagatccggggttcgtccggggtgactccggggtctatccggggtacttccggggttgctccggggtgtatccggggtggcgcgccatgcttcatcagactct

SEQ ID NO: 6125 - DNA, 156 bp, Artificial Sequence; identical to SEQ ID NO: 6124
  Synthetic polynucleotide

SEQ ID NO: 6126 - DNA, 191 bp, Artificial Sequence
  Synthetic polynucleotide
atcatctcaccttgcctcctgcactagtgtggtcccaacctgcaggttaaccacttgaaaattagattaaccacttgaaaatttcgttaaccacttgaaaattgacttaaccacttgaaaattctattaaccacttgaaaattactttaaccacttgaaaatttgcggcgcgccatgcttcatcagactct

SEQ ID NO: 6127 - DNA, 191 bp, Artificial Sequence; identical to SEQ ID NO: 6126
  Synthetic polynucleotide

SEQ ID NO: 6128 - DNA, 172 bp, Artificial Sequence
  Synthetic polynucleotide
atcatctcaccttgcctcctgttgcatccacaattcgtcctgcagggctgagtcatagagctgagtcattcggctgagtcatgacgctgagtcatctagctgagtcatactgctgagtcattgcgctgagtcatgtagctgagtcatggcgcgccatgcttcatcagactct

SEQ ID NO: 6129 - DNA, 172 bp, Artificial Sequence; identical to SEQ ID NO: 6128
  Synthetic polynucleotide

SEQ ID NO: 6130 - DNA, 172 bp, Artificial Sequence
  Synthetic polynucleotide
atcatctcaccttgcctcctgtcttgtgaagctgggtgcctgcaggcacttccgctagacacttccgcttcgcacttccgctgaccacttccgctctacacttccgctactcacttccgcttgccacttccgctgtacacttccgctggcgcgccatgcttcatcagactct

SEQ ID NO: 6131 - DNA, 172 bp, Artificial Sequence; identical to SEQ ID NO: 6130
  Synthetic polynucleotide

SEQ ID NO: 6132 - DNA, 191 bp, Artificial Sequence
  Synthetic polynucleotide
atcatctcaccttgcctcctgaacacttcagacaacaacctgcagggataattaattagtttgagagataattaattagtttgtcggataattaattagtttggacgataattaattagtttgctagataattaattagtttgactgataattaattagtttgtgcggcgcgccatgcttcatcagactct

SEQ ID NO: 6133 - DNA, 191 bp, Artificial Sequence; identical to SEQ ID NO: 6132
  Synthetic polynucleotide

SEQ ID NO: 6134 - DNA, 196 bp, Artificial Sequence
  Synthetic polynucleotide
atcatctcaccttgcctcctgcagcaagaaacagcggtcctgcagggggtgagggggaaagagggtgagggggaatcggggtgagggggaagacgggtgagggggaactagggtgagggggaaactgggtgagggggaatgcgggtgagggggaagtagggtgagggggaaggcgcgccatgcttcatcagactct

SEQ ID NO: 6135 - DNA, 196 bp, Artificial Sequence; identical to SEQ ID NO: 6134
  Synthetic polynucleotide

SEQ ID NO: 6136 - DNA, 172 bp, Artificial Sequence
  Synthetic polynucleotide
atcatctcaccttgcctcctgagtcaggagtgtgaagacctgcaggaataacggaaagaaataacggaatcgaataacggaagacaataacggaactaaataacggaaactaataacggaatgcaataacggaagtaaataacggaaggcgcgccatgcttcatcagactct

SEQ ID NO: 6137 - DNA, 172 bp, Artificial Sequence; identical to SEQ ID NO: 6136
  Synthetic polynucleotide

SEQ ID NO: 6138 - DNA, 164 bp, Artificial Sequence
  Synthetic polynucleotide
atcatctcaccttgcctcctgctattaacgggtaccaacctgcaggtgtttacgaagatgtttacgatcgtgtttacgagactgtttacgactatgtttacgaacttgtttacgatgctgtttacgagtatgtttacgaggcgcgccatgcttcatcagactct

SEQ ID NO: 6139 - DNA, 164 bp, Artificial Sequence; identical to SEQ ID NO: 6138
  Synthetic polynucleotide

SEQ ID NO: 6140 - DNA, 148 bp, Artificial Sequence
  Synthetic polynucleotide
atcatctcaccttgcctcctgaagtaagcgggagaccccctgcaggcattaacagacattaactcgcattaacgaccattaacctacattaacactcattaactgccattaacgtacattaacggcgcgccatgcttcatcagactct

SEQ ID NO: 6141 - DNA, 148 bp, Artificial Sequence; identical to SEQ ID NO: 6140
  Synthetic polynucleotide

SEQ ID NO: 6142 - DNA, 188 bp, Artificial Sequence
  Synthetic polynucleotide
atcatctcaccttgcctcctgcaccaacgcaattcccacctgcaggtggactttggccagatggactttggcctcgtggactttggccgactggactttggccctatggactttggccacttggactttggcctgctggactttggccgtatggactttggccggcgcgccatgcttcatcagactct

SEQ ID NO: 6143 - DNA, 188 bp, Artificial Sequence; identical to SEQ ID NO: 6142
  Synthetic polynucleotide

SEQ ID NO: 6144 - DNA, 197 bp, Artificial Sequence
  Synthetic polynucleotide
atcatctcaccttgcctcctgtgtgttagctctcagatcctgcaggccattgttatgcaaaagaccattgttatgcaaatcgccattgttatgcaaagacccattgttatgcaaactaccattgttatgcaaaactccattgttatgcaaatgcccattgttatgcaaagtaggcgcgccatgcttcatcagactct

SEQ ID NO: 6145 - DNA, 197 bp, Artificial Sequence; identical to SEQ ID NO: 6144
  Synthetic polynucleotide

SEQ ID NO: 6146 - DNA, 180 bp, Artificial Sequence
  Synthetic polynucleotide
atcatctcaccttgcctcctgaagagatcgaggctggtcctgcagggtgtggggaaaagagtgtggggaaatcggtgtggggaaagacgtgtggggaaactagtgtggggaaaactgtgtggggaaatgcgtgtggggaaagtagtgtggggaaaggcgcgccatgcttcatcagactct

SEQ ID NO: 6147 - DNA, 180 bp, Artificial Sequence; identical to SEQ ID NO: 6146
  Synthetic polynucleotide

SEQ ID NO: 6148 - DNA, 180 bp, Artificial Sequence
  Synthetic polynucleotide
atcatctcaccttgcctcctgtcagtttcgtgtctaggcctgcaggtggtttcggttagatggtttcggtttcgtggtttcggttgactggtttcggttctatggtttcggttacttggtttcggtttgctggtttcggttgtatggtttcggttggcgcgccatgcttcatcagactct

SEQ ID NO: 6149 - DNA, 180 bp, Artificial Sequence; identical to SEQ ID NO: 6148
  Synthetic polynucleotide

SEQ ID NO: 6150 - DNA, 185 bp, Artificial Sequence
  Synthetic polynucleotide
atcatctcaccttgcctcctgttgacttcagtgcaccgcctgcaggaagataagataagataagaaagataagataagatatcgaagataagataagatagacaagataagataagatactaaagataagataagataactaagataagataagatatgcggcgcgccatgcttcatcagactct

SEQ ID NO: 6151 - DNA, 185 bp, Artificial Sequence; identical to SEQ ID NO: 6150
  Synthetic polynucleotide

SEQ ID NO: 6152 - DNA, 191 bp, Artificial Sequence
  Synthetic polynucleotide
atcatctcaccttgcctcctgacagtagaaaccgaagtcctgcaggaattttacatgtatttaagaaattttacatgtatttatcgaattttacatgtatttagacaattttacatgtatttactaaattttacatgtatttaactaattttacatgtatttatgcggcgcgccatgcttcatcagactct

SEQ ID NO: 6153 - DNA, 191 bp, Artificial Sequence; identical to SEQ ID NO: 6152
  Synthetic polynucleotide

SEQ ID NO: 6154 - DNA, 172 bp, Artificial Sequence
  Synthetic polynucleotide
atcatctcaccttgcctcctgcgtgcacgaacctgatacctgcaggatgccagaccagaatgccagacctcgatgccagaccgacatgccagaccctaatgccagaccactatgccagacctgcatgccagaccgtaatgccagaccggcgcgccatgcttcatcagactct

SEQ ID NO: 6155 - DNA, 172 bp, Artificial Sequence; identical to SEQ ID NO: 6154
  Synthetic polynucleotide

SEQ ID NO: 6156 - DNA, 172 bp, Artificial Sequence
  Synthetic polynucleotide
atcatctcaccttgcctcctgctcctttgcctctgttacctgcaggggacttgtctagaggacttgtcttcgggacttgtctgacggacttgtctctaggacttgtctactggacttgtcttgcggacttgtctgtaggacttgtctggcgcgccatgcttcatcagactct

SEQ ID NO: 6157 - DNA, 172 bp, Artificial Sequence; identical to SEQ ID NO: 6156
  Synthetic polynucleotide

SEQ ID NO: 6158 - DNA, 188 bp, Artificial Sequence
  Synthetic polynucleotide
atcatctcaccttgcctcctgtcgcgtagactttgacgcctgcaggcggcacgtgccaagacggcacgtgccatcgcggcacgtgccagaccggcacgtgccactacggcacgtgccaactcggcacgtgccatgccggcacgtgccagtacggcacgtgccaggcgcgccatgcttcatcagactct

SEQ ID NO: 6159 - DNA, 188 bp, Artificial Sequence; identical to SEQ ID NO: 6158
  Synthetic polynucleotide

SEQ ID NO: 6160 - DNA, 148 bp, Artificial Sequence
  Synthetic polynucleotide
atcatctcaccttgcctcctgtggtgcgtaccttgagccctgcaggcttatcaagacttatcatcgcttatcagaccttatcactacttatcaactcttatcatgccttatcagtacttatcaggcgcgccatgcttcatcagactct

SEQ ID NO: 6161 - DNA, 148 bp, Artificial Sequence; identical to SEQ ID NO: 6160
  Synthetic polynucleotide

SEQ ID NO: 6162 - DNA, 190 bp, Artificial Sequence
  Synthetic polynucleotide
atcatctcaccttgcctcctgagccttgtcgaaaggttcctgcaggattattgattttttagaattattgatttttttcgattattgattttttgacattattgattttttctaattattgattttttactattattgatttttttgcattattgattttttgtaggcgcgccatgcttcatcagactct

SEQ ID NO: 6163 - DNA, 190 bp, Artificial Sequence; identical to SEQ ID NO: 6162
  Synthetic polynucleotide

SEQ ID NO: 6164 - DNA, 188 bp, Artificial Sequence
  Synthetic polynucleotide
atcatctcaccttgcctcctggattcctatgtgttagccctgcaggaaacaaacaatcagaaaacaaacaatctcgaaacaaacaatcgacaaacaaacaatcctaaaacaaacaatcactaaacaaacaatctgcaaacaaacaatcgtaaaacaaacaatcggcgcgccatgcttcatcagactct

SEQ ID NO: 6165 - DNA, 188 bp, Artificial Sequence; identical to SEQ ID NO: 6164
  Synthetic polynucleotide

SEQ ID NO: 6166 - DNA, 188 bp, Artificial Sequence
  Synthetic polynucleotide
atcatctcaccttgcctcctgatttgtagctgcacaatcctgcaggcggcacgtgccgagacggcacgtgccgtcgcggcacgtgccggaccggcacgtgccgctacggcacgtgccgactcggcacgtgccgtgccggcacgtgccggtacggcacgtgccgggcgcgccatgcttcatcagactct

SEQ ID NO: 6167 - DNA, 188 bp, Artificial Sequence; identical to SEQ ID NO: 6166
  Synthetic polynucleotide

SEQ ID NO: 6168 - DNA, 180 bp, Artificial Sequence
  Synthetic polynucleotide
atcatctcaccttgcctcctgaaattgttcgcagagatcctgcaggtaggtgtgaagagataggtgtgaagtcgtaggtgtgaaggactaggtgtgaagctataggtgtgaagacttaggtgtgaagtgctaggtgtgaaggtataggtgtgaagggcgcgccatgcttcatcagactct

SEQ ID NO: 6169 - DNA, 180 bp, Artificial Sequence; identical to SEQ ID NO: 6168
  Synthetic polynucleotide

SEQ ID NO: 6170 - DNA, 156 bp, Artificial Sequence
  Synthetic polynucleotide
atcatctcaccttgcctcctgcttgtaaatcacccagccctgcaggaaggtcacagaaaggtcactcgaaggtcacgacaaggtcacctaaaggtcacactaaggtcactgcaaggtcacgtaaaggtcacggcgcgccatgcttcatcagactct

SEQ ID NO: 6171 - DNA, 156 bp, Artificial Sequence; identical to SEQ ID NO: 6170
  Synthetic polynucleotide

SEQ ID NO: 6172 - DNA, 191 bp, Artificial Sequence
  Synthetic polynucleotide
atcatctcaccttgcctcctgtcttcgtgggttccctgcctgcagggccacaggaagtaacacagagccacaggaagtaacactcggccacaggaagtaacacgacgccacaggaagtaacacctagccacaggaagtaacacactgccacaggaagtaacactgcggcgcgccatgcttcatcagactct

SEQ ID NO: 6173 - DNA, 191 bp, Artificial Sequence; identical to SEQ ID NO: 6172
  Synthetic polynucleotide

SEQ ID NO: 6174 - DNA, 188 bp, Artificial Sequence
  Synthetic polynucleotide
atcatctcaccttgcctcctgtaatacgaccctcatggcctgcaggcaacgtccgcggagacaacgtccgcggtcgcaacgtccgcgggaccaacgtccgcggctacaacgtccgcggactcaacgtccgcggtgccaacgtccgcgggtacaacgtccgcggggcgcgccatgcttcatcagactct

SEQ ID NO: 6175 - DNA, 188 bp, Artificial Sequence; identical to SEQ ID NO: 6174
  Synthetic polynucleotide

SEQ ID NO: 6176 - DNA, 190 bp, Artificial Sequence
  Synthetic polynucleotide
atcatctcaccttgcctcctgccgtcagagacatatcacctgcagggcgaaacatctggaagagcgaaacatctggatcggcgaaacatctggagacgcgaaacatctggactagcgaaacatctggaactgcgaaacatctggatgcgcgaaacatctggagtaggcgcgccatgcttcatcagactct

SEQ ID NO: 6177 - DNA, 190 bp, Artificial Sequence; identical to SEQ ID NO: 6176
  Synthetic polynucleotide

SEQ ID NO: 6178 - DNA, 164 bp, Artificial Sequence
  Synthetic polynucleotide
atcatctcaccttgcctcctgcgtagttgagggttcgacctgcaggggattatccagaggattatcctcgggattatccgacggattatccctaggattatccactggattatcctgcggattatccgtaggattatccggcgcgccatgcttcatcagactct

SEQ ID NO: 6179 - DNA, 164 bp, Artificial Sequence; identical to SEQ ID NO: 6178
  Synthetic polynucleotide

SEQ ID NO: 6180 - DNA, 196 bp, Artificial Sequence
  Synthetic polynucleotide
atcatctcaccttgcctcctgattacaaaggccaactacctgcaggtactgggaataccagatactgggaatacctcgtactgggaataccgactactgggaataccctatactgggaataccacttactgggaatacctgctactgggaataccgtatactgggaataccggcgcgccatgcttcatcagactct

SEQ ID NO: 6181 - DNA, 196 bp, Artificial Sequence; identical to SEQ ID NO: 6180
  Synthetic polynucleotide

SEQ ID NO: 6182 - DNA, 172 bp, Artificial Sequence
  Synthetic polynucleotide
atcatctcaccttgcctcctgatacatcttgttccgaacctgcagggtcattaagaagagtcattaagatcggtcattaagagacgtcattaagactagtcattaagaactgtcattaagatgcgtcattaagagtagtcattaagaggcgcgccatgcttcatcagactct

SEQ ID NO: 6183 - DNA, 172 bp, Artificial Sequence; identical to SEQ ID NO: 6182
  Synthetic polynucleotide

SEQ ID NO: 6184 - DNA, 164 bp, Artificial Sequence
  Synthetic polynucleotide
atcatctcaccttgcctcctgttagccatcgaggccgtcctgcaggattggcactagaattggcacttcgattggcactgacattggcactctaattggcactactattggcacttgcattggcactgtaattggcactggcgcgccatgcttcatcagactct

SEQ ID NO: 6185 - DNA, 164 bp, Artificial Sequence; identical to SEQ ID NO: 6184
  Synthetic polynucleotide

SEQ ID NO: 6186 - DNA, 140 bp, Artificial Sequence
  Synthetic polynucleotide
atcatctcaccttgcctcctgcccttctctaagcctctcctgcaggtcaaagagatcaaagtcgtcaaaggactcaaagctatcaaagacttcaaagtgctcaaaggtatcaaagggcgcgccatgcttcatcagactct

SEQ ID NO: 6187 - DNA, 140 bp, Artificial Sequence; identical to SEQ ID NO: 6186
  Synthetic polynucleotide

SEQ ID NO: 6188 - DNA, 172 bp, Artificial Sequence
  Synthetic polynucleotide
atcatctcaccttgcctcctggtcagtgcccgttaagacctgcagggtagcaaccaagagtagcaaccatcggtagcaaccagacgtagcaaccactagtagcaaccaactgtagcaaccatgcgtagcaaccagtagtagcaaccaggcgcgccatgcttcatcagactct

SEQ ID NO: 6189 - DNA, 172 bp, Artificial Sequence; identical to SEQ ID NO: 6188
  Synthetic polynucleotide

SEQ ID NO: 6190 - DNA, 180 bp, Artificial Sequence
  Synthetic polynucleotide
atcatctcaccttgcctcctgcaaagaatcaacgcgctcctgcaggctgtctggctaagactgtctggctatcgctgtctggctagacctgtctggctactactgtctggctaactctgtctggctatgcctgtctggctagtactgtctggctaggcgcgccatgcttcatcagactct

SEQ ID NO: 6191 - DNA, 180 bp, Artificial Sequence; identical to SEQ ID NO: 6190
  Synthetic polynucleotide

SEQ ID NO: 6192 - DNA, 156 bp, Artificial Sequence
  Synthetic polynucleotide
atcatctcaccttgcctcctgtggctatgtgacatgaccctgcaggaaggtcaaagaaaggtcaatcgaaggtcaagacaaggtcaactaaaggtcaaactaaggtcaatgcaaggtcaagtaaaggtcaaggcgcgccatgcttcatcagactct

SEQ ID NO: 6193 - DNA, 156 bp, Artificial Sequence; identical to SEQ ID NO: 6192
  Synthetic polynucleotide

SEQ ID NO: 6194 - DNA, 180 bp, Artificial Sequence
  Synthetic polynucleotide
atcatctcaccttgcctcctgcctgaggctcttactgacctgcaggttgattaatgcagattgattaatgctcgttgattaatgcgacttgattaatgcctattgattaatgcactttgattaatgctgcttgattaatgcgtattgattaatgcggcgcgccatgcttcatcagactct

SEQ ID NO: 6195 - DNA, 180 bp, Artificial Sequence; identical to SEQ ID NO: 6194
  Synthetic polynucleotide

SEQ ID NO: 6196 - DNA, 200 bp, Artificial Sequence
  Synthetic polynucleotide
atcatctcaccttgcctcctgcgtcaagttgcaccggacctgcaggacagggtcaaaggtcaagaagaacagggtcaaaggtcaagatcgacagggtcaaaggtcaagagacacagggtcaaaggtcaagactaacagggtcaaaggtcaagaactacagggtcaaaggtcaagaggcgcgccatgcttcatcagactct

SEQ ID NO: 6197 - DNA, 200 bp, Artificial Sequence; identical to SEQ ID NO: 6196
  Synthetic polynucleotide

SEQ ID NO: 6198 - DNA, 196 bp, Artificial Sequence
  Synthetic polynucleotide
atcatctcaccttgcctcctggcgagttaaactgctgtcctgcagggaggggcgcagctgcgccccatagagaggggcgcagctgcgccccattcggaggggcgcagctgcgccccatgacgaggggcgcagctgcgccccatctagaggggcgcagctgcgccccatactggcgcgccatgcttcatcagactct

SEQ ID NO: 6199 - DNA, 196 bp, Artificial Sequence; identical to SEQ ID NO: 6198
  Synthetic polynucleotide

SEQ ID NO: 6200 - DNA, 172 bp, Artificial Sequence
  Synthetic polynucleotide
atcatctcaccttgcctcctggtccgctgcctctaagacctgcaggttagcaggaaagattagcaggaatcgttagcaggaagacttagcaggaactattagcaggaaactttagcaggaatgcttagcaggaagtattagcaggaaggcgcgccatgcttcatcagactct

SEQ ID NO: 6201 - DNA, 172 bp, Artificial Sequence; identical to SEQ ID NO: 6200
  Synthetic polynucleotide

SEQ ID NO: 6202 - DNA, 180 bp, Artificial Sequence
  Synthetic polynucleotide
atcatctcaccttgcctcctgtactcgtgcagcaaattcctgcaggtgacgtcagtgagatgacgtcagtgtcgtgacgtcagtggactgacgtcagtgctatgacgtcagtgacttgacgtcagtgtgctgacgtcagtggtatgacgtcagtgggcgcgccatgcttcatcagactct

SEQ ID NO: 6203 - DNA, 180 bp, Artificial Sequence; identical to SEQ ID NO: 6202
  Synthetic polynucleotide

SEQ ID NO: 6204 - DNA, 190 bp, Artificial Sequence
  Synthetic polynucleotide
atcatctcaccttgcctcctgagctagatgaagatcatcctgcaggattcccaagggaatagaattcccaagggaattcgattcccaagggaatgacattcccaagggaatctaattcccaagggaatactattcccaagggaattgcattcccaagggaatgtaggcgcgccatgcttcatcagactct

SEQ ID NO: 6205 - DNA, 190 bp, Artificial Sequence; identical to SEQ ID NO: 6204
  Synthetic polynucleotide

SEQ ID NO: 6206 - DNA, 172 bp, Artificial Sequence
  Synthetic polynucleotide
atcatctcaccttgcctcctgtatgacctctgagtgtacctgcaggagagataagaagaagagataagatcgagagataagagacagagataagactaagagataagaactagagataagatgcagagataagagtaagagataagaggcgcgccatgcttcatcagactct

SEQ ID NO: 6207 - DNA, 172 bp, Artificial Sequence; identical to SEQ ID NO: 6206
  Synthetic polynucleotide

SEQ ID NO: 6208 - DNA, 190 bp, Artificial Sequence
  Synthetic polynucleotide
atcatctcaccttgcctcctgtctttcgatgcgtcggtcctgcagggcacctcgcacagcagagcacctcgcacagctcggcacctcgcacagcgacgcacctcgcacagcctagcacctcgcacagcactgcacctcgcacagctgcgcacctcgcacagcgtaggcgcgccatgcttcatcagactct

SEQ ID NO: 6209 - DNA, 190 bp, Artificial Sequence; identical to SEQ ID NO: 6208
  Synthetic polynucleotide

SEQ ID NO: 6210 - DNA, 180 bp, Artificial Sequence
  Synthetic polynucleotide
atcatctcaccttgcctcctgccatgtatattgccttccctgcaggggtaataaaaaagaggtaataaaaatcgggtaataaaaagacggtaataaaaactaggtaataaaaaactggtaataaaaatgcggtaataaaaagtaggtaataaaaaggcgcgccatgcttcatcagactct

SEQ ID NO: 6211 - DNA, 180 bp, Artificial Sequence; identical to SEQ ID NO: 6210
  Synthetic polynucleotide

SEQ ID NO: 6212 - DNA, 188 bp, Artificial Sequence
  Synthetic polynucleotide
atcatctcaccttgcctcctggaagaaggcacggtctccctgcagggaaagcgaaactagagaaagcgaaacttcggaaagcgaaactgacgaaagcgaaactctagaaagcgaaactactgaaagcgaaacttgcgaaagcgaaactgtagaaagcgaaactggcgcgccatgcttcatcagactct

SEQ ID NO: 6213 - DNA, 188 bp, Artificial Sequence; identical to SEQ ID NO: 6212
  Synthetic polynucleotide

SEQ ID NO: 6214 - DNA, 185 bp, Artificial Sequence
  Synthetic polynucleotide
atcatctcaccttgcctcctgctgacccagagaatgatcctgcaggggttatttttaaaccgagaggttatttttaaaccgtcgggttatttttaaaccggacggttatttttaaaccgctaggttatttttaaaccgactggttatttttaaaccgtgcggcgcgccatgcttcatcagactct

SEQ ID NO: 6215 - DNA, 185 bp, Artificial Sequence; identical to SEQ ID NO: 6214
  Synthetic polynucleotide

SEQ ID NO: 6216 - DNA, 156 bp, Artificial Sequence
  Synthetic polynucleotide
atcatctcaccttgcctcctggcactacacaaagtgatcctgcaggcaggaaggagacaggaaggtcgcaggaagggaccaggaaggctacaggaaggactcaggaaggtgccaggaagggtacaggaaggggcgcgccatgcttcatcagactct

SEQ ID NO: 6217 - DNA, 156 bp, Artificial Sequence; identical to SEQ ID NO: 6216
  Synthetic polynucleotide

SEQ ID NO: 6218 - DNA, 164 bp, Artificial Sequence
  Synthetic polynucleotide
atcatctcaccttgcctcctgggttatgacgtgagctacctgcagggctgattacagagctgattactcggctgattacgacgctgattacctagctgattacactgctgattactgcgctgattacgtagctgattacggcgcgccatgcttcatcagactct

SEQ ID NO: 6219 - DNA, 164 bp, Artificial Sequence; identical to SEQ ID NO: 6218
  Synthetic polynucleotide

SEQ ID NO: 6220 - DNA, 180 bp, Artificial Sequence
  Synthetic polynucleotide
atcatctcaccttgcctcctgctgtgtttcattcggaacctgcaggtttttattaccagatttttattacctcgtttttattaccgactttttattaccctatttttattaccacttttttattacctgctttttattaccgtatttttattaccggcgcgccatgcttcatcagactct

SEQ ID NO: 6221 - DNA, 180 bp, Artificial Sequence; identical to SEQ ID NO: 6220
  Synthetic polynucleotide

SEQ ID NO: 6222 - DNA, 172 bp, Artificial Sequence
  Synthetic polynucleotide
atcatctcaccttgcctcctgtcacactgactggatggcctgcaggggtggtcatgagaggtggtcatgtcgggtggtcatggacggtggtcatgctaggtggtcatgactggtggtcatgtgcggtggtcatggtaggtggtcatgggcgcgccatgcttcatcagactct

SEQ ID NO: 6223 - DNA, 172 bp, Artificial Sequence; identical to SEQ ID NO: 6222
  Synthetic polynucleotide

SEQ ID NO: 6224 - DNA, 180 bp, Artificial Sequence
  Synthetic polynucleotide
atcatctcaccttgcctcctggctctatcttacactagcctgcagggagtgagtcatagagagtgagtcattcggagtgagtcatgacgagtgagtcatctagagtgagtcatactgagtgagtcattgcgagtgagtcatgtagagtgagtcatggcgcgccatgcttcatcagactct

SEQ ID NO: 6225 - DNA, 180 bp, Artificial Sequence; identical to SEQ ID NO: 6224
  Synthetic polynucleotide

SEQ ID NO: 6226 - DNA, 188 bp, Artificial Sequence
  Synthetic polynucleotide
atcatctcaccttgcctcctggtgtactcgataaaccgcctgcaggtaatttatgcatagataatttatgcattcgtaatttatgcatgactaatttatgcatctataatttatgcatacttaatttatgcattgctaatttatgcatgtataatttatgcatggcgcgccatgcttcatcagactct

SEQ ID NO: 6227 - DNA, 188 bp, Artificial Sequence; identical to SEQ ID NO: 6226
  Synthetic polynucleotide

SEQ ID NO: 6228 - DNA, 148 bp, Artificial Sequence
  Synthetic polynucleotide
atcatctcaccttgcctcctgagacatgtctcgtcctccctgcaggcttatctagacttatcttcgcttatctgaccttatctctacttatctactcttatcttgccttatctgtacttatctggcgcgccatgcttcatcagactct

SEQ ID NO: 6229 - DNA, 148 bp, Artificial Sequence; identical to SEQ ID NO: 6228
  Synthetic polynucleotide

SEQ ID NO: 6230 - DNA, 199 bp, Artificial Sequence
  Synthetic polynucleotide
atcatctcaccttgcctcctgccaaatttacatagctgcctgcaggtgttggctccgtgccaaattgaacaggtgagatgttggctccgtgccaaattgaacaggtgtcgtgttggctccgtgccaaattgaacaggtggactgttggctccgtgccaaattgaacaggtgctaggcgcgccatgcttcatcagactct

SEQ ID NO: 6231 - DNA, 199 bp, Artificial Sequence; identical to SEQ ID NO: 6230
  Synthetic polynucleotide

SEQ ID NO: 6232 - DNA, 197 bp, Artificial Sequence
  Synthetic polynucleotide
atcatctcaccttgcctcctgttctctttgaggtgacacctgcaggaaccgcttccgggtcagaaaccgcttccgggtctcgaaccgcttccgggtcgacaaccgcttccgggtcctaaaccgcttccgggtcactaaccgcttccgggtctgcaaccgcttccgggtcgtaggcgcgccatgcttcatcagactct

SEQ ID NO: 6233 - DNA, 197 bp, Artificial Sequence; identical to SEQ ID NO: 6232
  Synthetic polynucleotide

SEQ ID NO: 6234 - DNA, 172 bp, Artificial Sequence
  Synthetic polynucleotide
atcatctcaccttgcctcctgctcaaccctgtacgttccctgcaggcgcgcgaaacagacgcgcgaaactcgcgcgcgaaacgaccgcgcgaaacctacgcgcgaaacactcgcgcgaaactgccgcgcgaaacgtacgcgcgaaacggcgcgccatgcttcatcagactct

SEQ ID NO: 6235 - DNA, 172 bp, Artificial Sequence; identical to SEQ ID NO: 6234
  Synthetic polynucleotide

SEQ ID NO: 6236 - DNA, 180 bp, Artificial Sequence
  Synthetic polynucleotide
atcatctcaccttgcctcctgcctgaagtgggcaaatccctgcaggtaattattaatagataattattaattcgtaattattaatgactaattattaatctataattattaatacttaattattaattgctaattattaatgtataattattaatggcgcgccatgcttcatcagactct

SEQ ID NO: 6237 - DNA, 180 bp, Artificial Sequence; identical to SEQ ID NO: 6236
  Synthetic polynucleotide

SEQ ID NO: 6238 - DNA, 191 bp, Artificial Sequence
  Synthetic polynucleotide
atcatctcaccttgcctcctgcccgacagatgatgaatcctgcagggtaactaattaactactagagtaactaattaactacttcggtaactaattaactactgacgtaactaattaactactctagtaactaattaactactactgtaactaattaactacttgcggcgcgccatgcttcatcagactct

SEQ ID NO: 6239 - DNA, 191 bp, Artificial Sequence; identical to SEQ ID NO: 6238
  Synthetic polynucleotide

SEQ ID NO: 6240 - DNA, 156 bp, Artificial Sequence
  Synthetic polynucleotide
atcatctcaccttgcctcctgactaaggaggcggtggacctgcaggaaggtcatagaaaggtcattcgaaggtcatgacaaggtcatctaaaggtcatactaaggtcattgcaaggtcatgtaaaggtcatggcgcgccatgcttcatcagactct

SEQ ID NO: 6241 - DNA, 156 bp, Artificial Sequence; identical to SEQ ID NO: 6240
  Synthetic polynucleotide

SEQ ID NO: 6242 - DNA, 196 bp, Artificial Sequence
  Synthetic polynucleotide
atcatctcaccttgcctcctgaggatcctcctttcgtccctgcaggattatgctaatttagaattatgctaattttcgattatgctaatttgacattatgctaatttctaattatgctaatttactattatgctaattttgcattatgctaatttgtaattatgctaatttggcgcgccatgcttcatcagactct

SEQ ID NO: 6243 - DNA, 196 bp, Artificial Sequence; identical to SEQ ID NO: 6242
  Synthetic polynucleotide

SEQ ID NO: 6244 - DNA, 164 bp, Artificial Sequence
  Synthetic polynucleotide
atcatctcaccttgcctcctgcttagacagtacctcaacctgcagggtgacgtgtagagtgacgtgttcggtgacgtgtgacgtgacgtgtctagtgacgtgtactgtgacgtgttgcgtgacgtgtgtagtgacgtgtggcgcgccatgcttcatcagactct

SEQ ID NO: 6245 - DNA, 164 bp, Artificial Sequence; identical to SEQ ID NO: 6244
  Synthetic polynucleotide

SEQ ID NO: 6246 - DNA, 156 bp, Artificial Sequence
  Synthetic polynucleotide
atcatctcaccttgcctcctgtcctattagactaactgcctgcagggtaattaaagagtaattaatcggtaattaagacgtaattaactagtaattaaactgtaattaatgcgtaattaagtagtaattaaggcgcgccatgcttcatcagactct

SEQ ID NO: 6247 - DNA, 156 bp, Artificial Sequence; identical to SEQ ID NO: 6246
  Synthetic polynucleotide

SEQ ID NO: 6248 - DNA, 156 bp, Artificial Sequence
  Synthetic polynucleotide
atcatctcaccttgcctcctgaccatggttgtgtgtaacctgcagggtaattacagagtaattactcggtaattacgacgtaattacctagtaattacactgtaattactgcgtaattacgtagtaattacggcgcgccatgcttcatcagactct

SEQ ID NO: 6249 - DNA, 156 bp, Artificial Sequence; identical to SEQ ID NO: 6248
  Synthetic polynucleotide

SEQ ID NO: 6250 - DNA, 164 bp, Artificial Sequence
  Synthetic polynucleotide
atcatctcaccttgcctcctgatcctcctatcggtcaacctgcaggaattacatgagaaattacatgtcgaattacatggacaattacatgctaaattacatgactaattacatgtgcaattacatggtaaattacatgggcgcgccatgcttcatcagactct

SEQ ID NO: 6251 - DNA, 164 bp, Artificial Sequence; identical to SEQ ID NO: 6250
  Synthetic polynucleotide

SEQ ID NO: 6252 - DNA, 164 bp, Artificial Sequence
  Synthetic polynucleotide
atcatctcaccttgcctcctggccattatctggctgctcctgcaggctgcccgcaagactgcccgcatcgctgcccgcagacctgcccgcactactgcccgcaactctgcccgcatgcctgcccgcagtactgcccgcaggcgcgccatgcttcatcagactct

SEQ ID NO: 6253 - DNA, 164 bp, Artificial Sequence; identical to SEQ ID NO: 6252
  Synthetic polynucleotide

SEQ ID NO: 6254 - DNA, 172 bp, Artificial Sequence
  Synthetic polynucleotide
atcatctcaccttgcctcctgcttcactgtaaaggtgtcctgcaggaattgatacaagaaattgatacatcgaattgatacagacaattgatacactaaattgatacaactaattgatacatgcaattgatacagtaaattgatacaggcgcgccatgcttcatcagactct

SEQ ID NO: 6255 - DNA, 172 bp, Artificial Sequence; identical to SEQ ID NO: 6254
  Synthetic polynucleotide

SEQ ID NO: 6256 - DNA, 172 bp, Artificial Sequence
  Synthetic polynucleotide
atcatctcaccttgcctcctggtctcctttagaggctccctgcaggagatttgaatagaagatttgaattcgagatttgaatgacagatttgaatctaagatttgaatactagatttgaattgcagatttgaatgtaagatttgaatggcgcgccatgcttcatcagactct

SEQ ID NO: 6257 - DNA, 172 bp, Artificial Sequence; identical to SEQ ID NO: 6256
  Synthetic polynucleotide

SEQ ID NO: 6258 - DNA, 172 bp, Artificial Sequence
  Synthetic polynucleotide
atcatctcaccttgcctcctggaacttcttggcaaggccctgcaggattttgctgaagaattttgctgatcgattttgctgagacattttgctgactaattttgctgaactattttgctgatgcattttgctgagtaattttgctgaggcgcgccatgcttcatcagactct

SEQ ID NO: 6259 - DNA, 172 bp, Artificial Sequence; identical to SEQ ID NO: 6258
  Synthetic polynucleotide

SEQ ID NO: 6260 - DNA, 156 bp, Artificial Sequence
  Synthetic polynucleotide
atcatctcaccttgcctcctgatatacaacgtagtacgcctgcagggtaattagagagtaattagtcggtaattaggacgtaattagctagtaattagactgtaattagtgcgtaattaggtagtaattagggcgcgccatgcttcatcagactct

SEQ ID NO: 6261 - DNA, 156 bp, Artificial Sequence; identical to SEQ ID NO: 6260
  Synthetic polynucleotide

SEQ ID NO: 6262 - DNA, 172 bp, Artificial Sequence
  Synthetic polynucleotide
atcatctcaccttgcctcctgtacgggtttcgggtccacctgcaggcgcgcgcgctagacgcgcgcgcttcgcgcgcgcgctgaccgcgcgcgctctacgcgcgcgctactcgcgcgcgcttgccgcgcgcgctgtacgcgcgcgctggcgcgccatgcttcatcagactct

SEQ ID NO: 6263 - DNA, 172 bp, Artificial Sequence; identical to SEQ ID NO: 6262
  Synthetic polynucleotide

SEQ ID NO: 6264 - DNA, 156 bp, Artificial Sequence
  Synthetic polynucleotide
atcatctcaccttgcctcctggcaagatgtaggtgagtcctgcaggcaggaagtagacaggaagttcgcaggaagtgaccaggaagtctacaggaagtactcaggaagttgccaggaagtgtacaggaagtggcgcgccatgcttcatcagactct

SEQ ID NO: 6265 - DNA, 156 bp, Artificial Sequence; identical to SEQ ID NO: 6264
  Synthetic polynucleotide

SEQ ID NO: 6266 - DNA, 164 bp, Artificial Sequence
  Synthetic polynucleotide
atcatctcaccttgcctcctgtgtgaaggccgaaagtccctgcagggagggtgggagagagggtgggtcggagggtggggacgagggtgggctagagggtgggactgagggtgggtgcgagggtggggtagagggtgggggcgcgccatgcttcatcagactct

SEQ ID NO: 6267 - DNA, 164 bp, Artificial Sequence; identical to SEQ ID NO: 6266
  Synthetic polynucleotide

SEQ ID NO: 6268 - DNA, 197 bp, Artificial Sequence
  Synthetic polynucleotide
atcatctcaccttgcctcctgtagggagggtaatcatacctgcaggtgacctttagatgaccttagatgacctttagatgacctttcgtgacctttagatgaccttgactgacctttagatgaccttctatgacctttagatgaccttacttgacctttagatgacctttgcggcgcgccatgcttcatcagactct

SEQ ID NO: 6269 - DNA, 197 bp, Artificial Sequence; identical to SEQ ID NO: 6268
  Synthetic polynucleotide

SEQ ID NO: 6270 - DNA, 197 bp, Artificial Sequence
  Synthetic polynucleotide
atcatctcaccttgcctcctggcacaccaaagctcatgcctgcaggatgaatggaattcatagaatgaatggaattcattcgatgaatggaattcatgacatgaatggaattcatctaatgaatggaattcatactatgaatggaattcattgcatgaatggaattcatgtaggcgcgccatgcttcatcagactct

SEQ ID NO: 6271 - DNA, 197 bp, Artificial Sequence; identical to SEQ ID NO: 6270
  Synthetic polynucleotide

SEQ ID NO: 6272 - DNA, 188 bp, Artificial Sequence
  Synthetic polynucleotide
atcatctcaccttgcctcctgtagcgtcctttcgagatcctgcagggaaagcgaaaccagagaaagcgaaacctcggaaagcgaaaccgacgaaagcgaaaccctagaaagcgaaaccactgaaagcgaaacctgcgaaagcgaaaccgtagaaagcgaaaccggcgcgccatgcttcatcagactct

SEQ ID NO: 6273 - DNA, 188 bp, Artificial Sequence; identical to SEQ ID NO: 6272
  Synthetic polynucleotide

SEQ ID NO: 6274 - DNA, 172 bp, Artificial Sequence
  Synthetic polynucleotide
atcatctcaccttgcctcctgagcgtgggacgaaagagcctgcaggcacattccatagacacattccattcgcacattccatgaccacattccatctacacattccatactcacattccattgccacattccatgtacacattccatggcgcgccatgcttcatcagactct

SEQ ID NO: 6275 - DNA, 172 bp, Artificial Sequence; identical to SEQ ID NO: 6274
  Synthetic polynucleotide

SEQ ID NO: 6276 - DNA, 198 bp, Artificial Sequence
  Synthetic polynucleotide
atcatctcaccttgcctcctgtgtgatctgtggagtttcctgcaggcagatgccgcccacgcattattcagacagatgccgcccacgcattattctcgcagatgccgcccacgcattattcgaccagatgccgcccacgcattattcctacagatgccgcccacgcattattcggcgcgccatgcttcatcagactct

SEQ ID NO: 6277 - DNA, 198 bp, Artificial Sequence; identical to SEQ ID NO: 6276
  Synthetic polynucleotide

SEQ ID NO: 6278 - DNA, 197 bp, Artificial Sequence
  Synthetic polynucleotide
atcatctcaccttgcctcctgtgtcgaggtgctctgtacctgcaggccacttccgggttcgagaccacttccgggttcgtcgccacttccgggttcggacccacttccgggttcgctaccacttccgggttcgactccacttccgggttcgtgcccacttccgggttcggtaggcgcgccatgcttcatcagactct

SEQ ID NO: 6279 - DNA, 197 bp, Artificial Sequence; identical to SEQ ID NO: 6278
  Synthetic polynucleotide

SEQ ID NO: 6280 - DNA, 188 bp, Artificial Sequence
  Synthetic polynucleotide
atcatctcaccttgcctcctgtaggtctcaaacggtggcctgcaggcttcctctttttagacttcctcttttttcgcttcctctttttgaccttcctctttttctacttcctctttttactcttcctcttttttgccttcctctttttgtacttcctctttttggcgcgccatgcttcatcagactct

SEQ ID NO: 6281 - DNA, 188 bp, Artificial Sequence; identical to SEQ ID NO: 6280
  Synthetic polynucleotide

SEQ ID NO: 6282 - DNA, 156 bp, Artificial Sequence
  Synthetic polynucleotide
atcatctcaccttgcctcctgagtcggttagctctttacctgcaggatctgataagaatctgatatcgatctgatagacatctgatactaatctgataactatctgatatgcatctgatagtaatctgataggcgcgccatgcttcatcagactct

SEQ ID NO: 6283 - DNA, 156 bp, Artificial Sequence; identical to SEQ ID NO: 6282
  Synthetic polynucleotide

SEQ ID NO: 6284 - DNA, 196 bp, Artificial Sequence
  Synthetic polynucleotide
atcatctcaccttgcctcctggaccattgatcggcgcacctgcaggggccacgtgacccagaggccacgtgaccctcgggccacgtgacccgacggccacgtgacccctaggccacgtgacccactggccacgtgaccctgcggccacgtgacccgtaggccacgtgacccggcgcgccatgcttcatcagactct

SEQ ID NO: 6285 - DNA, 196 bp, Artificial Sequence; identical to SEQ ID NO: 6284
  Synthetic polynucleotide

SEQ ID NO: 6286 - DNA, 191 bp, Artificial Sequence
  Synthetic polynucleotide
atcatctcaccttgcctcctgaacaaacgatattagggcctgcagggattaattaattaagtcagagattaattaattaagtctcggattaattaattaagtcgacgattaattaattaagtcctagattaattaattaagtcactgattaattaattaagtctgcggcgcgccatgcttcatcagactct

SEQ ID NO: 6287 - DNA, 191 bp, Artificial Sequence; identical to SEQ ID NO: 6286
  Synthetic polynucleotide

SEQ ID NO: 6288 - DNA, 148 bp, Artificial Sequence
  Synthetic polynucleotide
atcatctcaccttgcctcctgggaagatgtagtcggaacctgcaggcatgactagacatgacttcgcatgactgaccatgactctacatgactactcatgacttgccatgactgtacatgactggcgcgccatgcttcatcagactct

SEQ ID NO: 6289 - DNA, 148 bp, Artificial Sequence; identical to SEQ ID NO: 6288
  Synthetic polynucleotide

SEQ ID NO: 6290 - DNA, 188 bp, Artificial Sequence
  Synthetic polynucleotide
atcatctcaccttgcctcctgtttgagtacttacatggcctgcaggaaaggtgtcaaaagaaaaggtgtcaaatcgaaaggtgtcaaagacaaaggtgtcaaactaaaaggtgtcaaaactaaaggtgtcaaatgcaaaggtgtcaaagtaaaaggtgtcaaaggcgcgccatgcttcatcagactct

SEQ ID NO: 6291 - DNA, 188 bp, Artificial Sequence; identical to SEQ ID NO: 6290
  Synthetic polynucleotide

SEQ ID NO: 6292 - DNA, 197 bp, Artificial Sequence
  Synthetic polynucleotide
atcatctcaccttgcctcctggtaagtcacacagtcttcctgcaggctgactcatttccacattagactgactcatttccacatttcgctgactcatttccacattgacctgactcatttccacattctactgactcatttccacattactctgactcatttccacatttgcggcgcgccatgcttcatcagactct

SEQ ID NO: 6293 - DNA, 197 bp, Artificial Sequence; identical to SEQ ID NO: 6292
  Synthetic polynucleotide

SEQ ID NO: 6294 - DNA, 197 bp, Artificial Sequence
  Synthetic polynucleotide
atcatctcaccttgcctcctggtggcttgcagcatatacctgcaggttcgaaacgttcgaaagattcgaaacgttcgaatcgttcgaaacgttcgaagacttcgaaacgttcgaactattcgaaacgttcgaaactttcgaaacgttcgaatgcttcgaaacgttcgaagtaggcgcgccatgcttcatcagactct

SEQ ID NO: 6295 - DNA, 197 bp, Artificial Sequence; identical to SEQ ID NO: 6294
  Synthetic polynucleotide

SEQ ID NO: 6296 - DNA, 188 bp, Artificial Sequence
  Synthetic polynucleotide
atcatctcaccttgcctcctgctattagactaagcgaacctgcagggtttggcgcgaaagagtttggcgcgaatcggtttggcgcgaagacgtttggcgcgaactagtttggcgcgaaactgtttggcgcgaatgcgtttggcgcgaagtagtttggcgcgaaggcgcgccatgcttcatcagactct

SEQ ID NO: 6297 - DNA, 188 bp, Artificial Sequence; identical to SEQ ID NO: 6296
  Synthetic polynucleotide

SEQ ID NO: 6298 - DNA, 191 bp, Artificial Sequence
  Synthetic polynucleotide
atcatctcaccttgcctcctgttaccttcttccctcctcctgcaggggaaagcgaaactgaaaagaggaaagcgaaactgaaatcgggaaagcgaaactgaaagacggaaagcgaaactgaaactaggaaagcgaaactgaaaactggaaagcgaaactgaaatgcggcgcgccatgcttcatcagactct

SEQ ID NO: 6299 - DNA, 191 bp, Artificial Sequence; identical to SEQ ID NO: 6298
  Synthetic polynucleotide

SEQ ID NO: 6300 - DNA, 188 bp, Artificial Sequence
  Synthetic polynucleotide
atcatctcaccttgcctcctgcgaccagtgtaatcccacctgcagggggcccatttccagagggcccatttcctcggggcccatttccgacgggcccatttccctagggcccatttccactgggcccatttcctgcgggcccatttccgtagggcccatttccggcgcgccatgcttcatcagactct

SEQ ID NO: 6301 - DNA, 188 bp, Artificial Sequence; identical to SEQ ID NO: 6300
  Synthetic polynucleotide

SEQ ID NO: 6302 - DNA, 156 bp, Artificial Sequence
  Synthetic polynucleotide
atcatctcaccttgcctcctgatgacatgaacgaatgtcctgcaggccgttactagaccgttacttcgccgttactgacccgttactctaccgttactactccgttacttgcccgttactgtaccgttactggcgcgccatgcttcatcagactct

SEQ ID NO: 6303 - DNA, 156 bp, Artificial Sequence; identical to SEQ ID NO: 6302
  Synthetic polynucleotide

SEQ ID NO: 6304 - DNA, 172 bp, Artificial Sequence
  Synthetic polynucleotide
atcatctcaccttgcctcctgttctattagtcgtcatccctgcaggcaggaaataaagacaggaaataatcgcaggaaataagaccaggaaataactacaggaaataaactcaggaaataatgccaggaaataagtacaggaaataaggcgcgccatgcttcatcagactct

SEQ ID NO: 6305 - DNA, 172 bp, Artificial Sequence; identical to SEQ ID NO: 6304
  Synthetic polynucleotide

SEQ ID NO: 6306 - DNA, 164 bp, Artificial Sequence
  Synthetic polynucleotide
atcatctcaccttgcctcctgtcgggatgtcccactagcctgcaggtttcgcaatagatttcgcaattcgtttcgcaatgactttcgcaatctatttcgcaatacttttcgcaattgctttcgcaatgtatttcgcaatggcgcgccatgcttcatcagactct

SEQ ID NO: 6307 - DNA, 164 bp, Artificial Sequence; identical to SEQ ID NO: 6306
  Synthetic polynucleotide

SEQ ID NO: 6308 - DNA, 180 bp, Artificial Sequence
  Synthetic polynucleotide
atcatctcaccttgcctcctggggtattgtcgcaataccctgcaggccaccagagggagaccaccagagggtcgccaccagaggggacccaccagagggctaccaccagagggactccaccagagggtgcccaccagaggggtaccaccagagggggcgcgccatgcttcatcagactct

SEQ ID NO: 6309 - DNA, 180 bp, Artificial Sequence; identical to SEQ ID NO: 6308
  Synthetic polynucleotide

SEQ ID NO: 6310 - DNA, 164 bp, Artificial Sequence
  Synthetic polynucleotide
atcatctcaccttgcctcctggtttggaactgtatagtcctgcagggattttttcagagattttttctcggattttttcgacgattttttcctagattttttcactgattttttctgcgattttttcgtagattttttcggcgcgccatgcttcatcagactct

SEQ ID NO: 6311 - DNA, 164 bp, Artificial Sequence; identical to SEQ ID NO: 6310
  Synthetic polynucleotide

SEQ ID NO: 6312 - DNA, 196 bp, Artificial Sequence
  Synthetic polynucleotide
atcatctcaccttgcctcctggggcggatcatacctaacctgcaggggaagagtcacgtgaccaatacagaggaagagtcacgtgaccaatactcgggaagagtcacgtgaccaatacgacggaagagtcacgtgaccaatacctaggaagagtcacgtgaccaatacactggcgcgccatgcttcatcagactct

SEQ ID NO: 6313 - DNA, 196 bp, Artificial Sequence; identical to SEQ ID NO: 6312
  Synthetic polynucleotide

SEQ ID NO: 6314 - DNA, 156 bp, Artificial Sequence
  Synthetic polynucleotide
atcatctcaccttgcctcctggagtgttcccagagtagcctgcaggcgtgggaaagacgtgggaatcgcgtgggaagaccgtgggaactacgtgggaaactcgtgggaatgccgtgggaagtacgtgggaaggcgcgccatgcttcatcagactct

SEQ ID NO: 6315 - DNA, 156 bp, Artificial Sequence; identical to SEQ ID NO: 6314
  Synthetic polynucleotide

SEQ ID NO: 6316 - DNA, 190 bp, Artificial Sequence
  Synthetic polynucleotide
atcatctcaccttgcctcctgaatacactttgggaacgcctgcaggcttcgcggggggtcagacttcgcggggggtctcgcttcgcggggggtcgaccttcgcggggggtcctacttcgcggggggtcactcttcgcggggggtctgccttcgcggggggtcgtaggcgcgccatgcttcatcagactct

SEQ ID NO: 6317 - DNA, 190 bp, Artificial Sequence; identical to SEQ ID NO: 6316
  Synthetic polynucleotide

SEQ ID NO: 6318 - DNA, 185 bp, Artificial Sequence
  Synthetic polynucleotide
atcatctcaccttgcctcctgcctagcacgacgtttcacctgcaggagaccccccacgaagcagaagaccccccacgaagctcgagaccccccacgaagcgacagaccccccacgaagcctaagaccccccacgaagcactagaccccccacgaagctgcggcgcgccatgcttcatcagactct

SEQ ID NO: 6319 - DNA, 185 bp, Artificial Sequence; identical to SEQ ID NO: 6318
  Synthetic polynucleotide

SEQ ID NO: 6320 - DNA, 188 bp, Artificial Sequence
  Synthetic polynucleotide
atcatctcaccttgcctcctggtcaaagtaggttcacgcctgcaggaaccacgtgctcagaaaccacgtgctctcgaaccacgtgctcgacaaccacgtgctcctaaaccacgtgctcactaaccacgtgctctgcaaccacgtgctcgtaaaccacgtgctcggcgcgccatgcttcatcagactct

SEQ ID NO: 6321 - DNA, 188 bp, Artificial Sequence; identical to SEQ ID NO: 6320
  Synthetic polynucleotide

SEQ ID NO: 6322 - DNA, 196 bp, Artificial Sequence
  Synthetic polynucleotide
atcatctcaccttgcctcctgacgaagagtatcgcgggcctgcaggttatatacttattagattatatacttatttcgttatatacttattgacttatatacttattctattatatacttattactttatatacttatttgcttatatacttattgtattatatacttattggcgcgccatgcttcatcagactct

SEQ ID NO: 6323 - DNA, 196 bp, Artificial Sequence; identical to SEQ ID NO: 6322
  Synthetic polynucleotide

SEQ ID NO: 6324 - DNA, 164 bp, Artificial Sequence
  Synthetic polynucleotide
atcatctcaccttgcctcctgctgattcacatcggcaccctgcaggcaacaggtgagacaacaggtgtcgcaacaggtggaccaacaggtgctacaacaggtgactcaacaggtgtgccaacaggtggtacaacaggtgggcgcgccatgcttcatcagactct

SEQ ID NO: 6325 - DNA, 164 bp, Artificial Sequence; identical to SEQ ID NO: 6324
  Synthetic polynucleotide

SEQ ID NO: 6326 - DNA, 164 bp, Artificial Sequence
  Synthetic polynucleotide
atcatctcaccttgcctcctgcggcctagggcattcttcctgcaggctggactttagactggacttttcgctggactttgacctggactttctactggactttactctggacttttgcctggactttgtactggactttggcgcgccatgcttcatcagactct

SEQ ID NO: 6327 - DNA, 164 bp, Artificial Sequence; identical to SEQ ID NO: 6326
  Synthetic polynucleotide

SEQ ID NO: 6328 - DNA, 196 bp, Artificial Sequence
  Synthetic polynucleotide
atcatctcaccttgcctcctgtggcactgggttcgacacctgcaggatggaaatttccaagaatggaaatttccatcgatggaaatttccagacatggaaatttccactaatggaaatttccaactatggaaatttccatgcatggaaatttccagtaatggaaatttccaggcgcgccatgcttcatcagactct

SEQ ID NO: 6329 - DNA, 196 bp, Artificial Sequence; identical to SEQ ID NO: 6328
  Synthetic polynucleotide

SEQ ID NO: 6330 - DNA, 156 bp, Artificial Sequence
  Synthetic polynucleotide
atcatctcaccttgcctcctgaccgaagaccgtagttgcctgcaggcaggaaatagacaggaaattcgcaggaaatgaccaggaaatctacaggaaatactcaggaaattgccaggaaatgtacaggaaatggcgcgccatgcttcatcagactct

SEQ ID NO: 6331 - DNA, 156 bp, Artificial Sequence; identical to SEQ ID NO: 6330
  Synthetic polynucleotide

SEQ ID NO: 6332 - DNA, 164 bp, Artificial Sequence
  Synthetic polynucleotide
atcatctcaccttgcctcctgatcgtagcggattgaaacctgcagggggttgcccagagggttgccctcggggttgcccgacgggttgcccctagggttgcccactgggttgccctgcgggttgcccgtagggttgcccggcgcgccatgcttcatcagactct

SEQ ID NO: 6333 - DNA, 164 bp, Artificial Sequence; identical to SEQ ID NO: 6332
  Synthetic polynucleotide

SEQ ID NO: 6334 - DNA, 190 bp, Artificial Sequence
  Synthetic polynucleotide
atcatctcaccttgcctcctgtagtcgacacgatctggcctgcaggggtgactcatcctgagaggtgactcatcctgtcgggtgactcatcctggacggtgactcatcctgctaggtgactcatcctgactggtgactcatcctgtgcggtgactcatcctggtaggcgcgccatgcttcatcagactct

SEQ ID NO: 6335 - DNA, 190 bp, Artificial Sequence; identical to SEQ ID NO: 6334
  Synthetic polynucleotide

SEQ ID NO: 6336 - DNA, 197 bp, Artificial Sequence
  Synthetic polynucleotide
atcatctcaccttgcctcctgggtattcaaggctcgcgcctgcaggtcacttcctctttttagatcacttcctcttttttcgtcacttcctctttttgactcacttcctctttttctatcacttcctctttttacttcacttcctcttttttgctcacttcctctttttgtaggcgcgccatgcttcatcagactct

SEQ ID NO: 6337 - DNA, 197 bp, Artificial Sequence; identical to SEQ ID NO: 6336
  Synthetic polynucleotide

SEQ ID NO: 6338 - DNA, 197 bp, Artificial Sequence
  Synthetic polynucleotide
atcatctcaccttgcctcctgggacataaggttagggacctgcaggtggttgctctttttgagatggttgctctttttgtcgtggttgctctttttggactggttgctctttttgctatggttgctctttttgacttggttgctctttttgtgctggttgctctttttggtaggcgcgccatgcttcatcagactct

SEQ ID NO: 6339 - DNA, 197 bp, Artificial Sequence; identical to SEQ ID NO: 6338
  Synthetic polynucleotide

SEQ ID NO: 6340 - DNA, 172 bp, Artificial Sequence
  Synthetic polynucleotide
atcatctcaccttgcctcctgctaggacaaatcgatcacctgcagggccccgcccaagagccccgcccatcggccccgcccagacgccccgcccactagccccgcccaactgccccgcccatgcgccccgcccagtagccccgcccaggcgcgccatgcttcatcagactct

SEQ ID NO: 6341 - DNA, 172 bp, Artificial Sequence; identical to SEQ ID NO: 6340
  Synthetic polynucleotide

SEQ ID NO: 6342 - DNA, 185 bp, Artificial Sequence
  Synthetic polynucleotide
atcatctcaccttgcctcctgcctacattaccgctcttcctgcaggaggttaattgagtaaaagaaggttaattgagtaaatcgaggttaattgagtaaagacaggttaattgagtaaactaaggttaattgagtaaaactaggttaattgagtaaatgcggcgcgccatgcttcatcagactct

SEQ ID NO: 6343 - DNA, 185 bp, Artificial Sequence; identical to SEQ ID NO: 6342
  Synthetic polynucleotide

SEQ ID NO: 6344 - DNA, 172 bp, Artificial Sequence
  Synthetic polynucleotide
atcatctcaccttgcctcctgatcctaggcttgactggcctgcaggtttttatgggagatttttatgggtcgtttttatggggactttttatgggctatttttatgggacttttttatgggtgctttttatggggtatttttatgggggcgcgccatgcttcatcagactct

SEQ ID NO: 6345 - DNA, 172 bp, Artificial Sequence; identical to SEQ ID NO: 6344
  Synthetic polynucleotide

SEQ ID NO: 6346 - DNA, 197 bp, Artificial Sequence
  Synthetic polynucleotide
atcatctcaccttgcctcctgacgcgtggttgaacagtcctgcagggtgatttaacataatagagtgatttaacataattcggtgatttaacataatgacgtgatttaacataatctagtgatttaacataatactgtgatttaacataattgcgtgatttaacataatgtaggcgcgccatgcttcatcagactct

SEQ ID NO: 6347 - DNA, 197 bp, Artificial Sequence; identical to SEQ ID NO: 6346
  Synthetic polynucleotide

SEQ ID NO: 6348 - DNA, 188 bp, Artificial Sequence
  Synthetic polynucleotide
atcatctcaccttgcctcctgcgctcttggttggaaagcctgcaggtgtcacgtggtcagatgtcacgtggtctcgtgtcacgtggtcgactgtcacgtggtcctatgtcacgtggtcacttgtcacgtggtctgctgtcacgtggtcgtatgtcacgtggtcggcgcgccatgcttcatcagactct

SEQ ID NO: 6349 - DNA, 188 bp, Artificial Sequence; identical to SEQ ID NO: 6348
  Synthetic polynucleotide

SEQ ID NO: 6350 - DNA, 156 bp, Artificial Sequence
  Synthetic polynucleotide
atcatctcaccttgcctcctggtgttgtcgactcagcacctgcaggtctaaattagatctaaatttcgtctaaattgactctaaattctatctaaattacttctaaatttgctctaaattgtatctaaattggcgcgccatgcttcatcagactct

SEQ ID NO: 6351 - DNA, 156 bp, Artificial Sequence; identical to SEQ ID NO: 6350
  Synthetic polynucleotide

SEQ ID NO: 6352 - DNA, 188 bp, Artificial Sequence
  Synthetic polynucleotide
atcatctcaccttgcctcctgcacacagggtatccaatcctgcaggtgaccttgacctagatgaccttgaccttcgtgaccttgacctgactgaccttgacctctatgaccttgacctacttgaccttgaccttgctgaccttgacctgtatgaccttgacctggcgcgccatgcttcatcagactct

SEQ ID NO: 6353 - DNA, 188 bp, Artificial Sequence; identical to SEQ ID NO: 6352
  Synthetic polynucleotide

SEQ ID NO: 6354 - DNA, 172 bp, Artificial Sequence
  Synthetic polynucleotide
atcatctcaccttgcctcctggttagggctgataaagacctgcaggagccccccaaagaagccccccaatcgagccccccaagacagccccccaactaagccccccaaactagccccccaatgcagccccccaagtaagccccccaaggcgcgccatgcttcatcagactct

SEQ ID NO: 6355 - DNA, 172 bp, Artificial Sequence; identical to SEQ ID NO: 6354
  Synthetic polynucleotide

SEQ ID NO: 6356 - DNA, 191 bp, Artificial Sequence
  Synthetic polynucleotide
atcatctcaccttgcctcctgtagacctctcgcttgtgcctgcaggcaataccggaagtgtaaagacaataccggaagtgtaatcgcaataccggaagtgtaagaccaataccggaagtgtaactacaataccggaagtgtaaactcaataccggaagtgtaatgcggcgcgccatgcttcatcagactct

SEQ ID NO: 6357 - DNA, 191 bp, Artificial Sequence; identical to SEQ ID NO: 6356
  Synthetic polynucleotide

SEQ ID NO: 6358 - DNA, 197 bp, Artificial Sequence
  Synthetic polynucleotide
atcatctcaccttgcctcctgatgggctcaggtagctccctgcaggattccctgaggggaaagaattccctgaggggaatcgattccctgaggggaagacattccctgaggggaactaattccctgaggggaaactattccctgaggggaatgcattccctgaggggaagtaggcgcgccatgcttcatcagactct

SEQ ID NO: 6359 - DNA, 197 bp, Artificial Sequence; identical to SEQ ID NO: 6358
  Synthetic polynucleotide

SEQ ID NO: 6360 - DNA, 180 bp, Artificial Sequence
  Synthetic polynucleotide
atcatctcaccttgcctcctgtatttctggactataggcctgcagggaccatctggtagagaccatctggttcggaccatctggtgacgaccatctggtctagaccatctggtactgaccatctggttgcgaccatctggtgtagaccatctggtggcgcgccatgcttcatcagactct

SEQ ID NO: 6361 - DNA, 180 bp, Artificial Sequence; identical to SEQ ID NO: 6360
  Synthetic polynucleotide

SEQ ID NO: 6362 - DNA, 156 bp, Artificial Sequence
  Synthetic polynucleotide
atcatctcaccttgcctcctgagtacggacctctcgttcctgcaggtctagtggagatctagtggtcgtctagtgggactctagtggctatctagtggacttctagtggtgctctagtgggtatctagtggggcgcgccatgcttcatcagactct

SEQ ID NO: 6363 - DNA, 156 bp, Artificial Sequence; identical to SEQ ID NO: 6362
  Synthetic polynucleotide

SEQ ID NO: 6364 - DNA, 191 bp, Artificial Sequence
  Synthetic polynucleotide
atcatctcaccttgcctcctgtcatgacagcggagcgacctgcaggctcatgcataattaatgagactcatgcataattaatgtcgctcatgcataattaatggacctcatgcataattaatgctactcatgcataattaatgactctcatgcataattaatgtgcggcgcgccatgcttcatcagactct

SEQ ID NO: 6365 - DNA, 191 bp, Artificial Sequence; identical to SEQ ID NO: 6364
  Synthetic polynucleotide

SEQ ID NO: 6366 - DNA, 191 bp, Artificial Sequence
  Synthetic polynucleotide
atcatctcaccttgcctcctgtcgtatccgcctcaacgcctgcagggcccccacctccccgccagagcccccacctccccgcctcggcccccacctccccgccgacgcccccacctccccgccctagcccccacctccccgccactgcccccacctccccgcctgcggcgcgccatgcttcatcagactct

SEQ ID NO: 6367 - DNA, 191 bp, Artificial Sequence; identical to SEQ ID NO: 6366
  Synthetic polynucleotide

SEQ ID NO: 6368 - DNA, 197 bp, Artificial Sequence
  Synthetic polynucleotide
atcatctcaccttgcctcctgtaggtgcgtttgtaggccctgcaggaagccccccaaaaatagaaagccccccaaaaattcgaagccccccaaaaatgacaagccccccaaaaatctaaagccccccaaaaatactaagccccccaaaaattgcaagccccccaaaaatgtaggcgcgccatgcttcatcagactct

SEQ ID NO: 6369 - DNA, 197 bp, Artificial Sequence; identical to SEQ ID NO: 6368
  Synthetic polynucleotide

SEQ ID NO: 6370 - DNA, 188 bp, Artificial Sequence
  Synthetic polynucleotide
atcatctcaccttgcctcctgtatcgaggtcgcattcccctgcaggctgttgaatattagactgttgaatatttcgctgttgaatattgacctgttgaatattctactgttgaatattactctgttgaatatttgcctgttgaatattgtactgttgaatattggcgcgccatgcttcatcagactct

SEQ ID NO: 6371 - DNA, 188 bp, Artificial Sequence; identical to SEQ ID NO: 6370
  Synthetic polynucleotide

SEQ ID NO: 6372 - DNA, 188 bp, Artificial Sequence
  Synthetic polynucleotide
atcatctcaccttgcctcctgaaacagtgatatctaggcctgcagggtacaggtgaatagagtacaggtgaattcggtacaggtgaatgacgtacaggtgaatctagtacaggtgaatactgtacaggtgaattgcgtacaggtgaatgtagtacaggtgaatggcgcgccatgcttcatcagactct

SEQ ID NO: 6373 - DNA, 188 bp, Artificial Sequence; identical to SEQ ID NO: 6372
  Synthetic polynucleotide

SEQ ID NO: 6374 - DNA, 180 bp, Artificial Sequence
  Synthetic polynucleotide
atcatctcaccttgcctcctggatcttacaagttaggacctgcaggaagatggcggcagaaagatggcggctcgaagatggcggcgacaagatggcggcctaaagatggcggcactaagatggcggctgcaagatggcggcgtaaagatggcggcggcgcgccatgcttcatcagactct

SEQ ID NO: 6375 - DNA, 180 bp, Artificial Sequence; identical to SEQ ID NO: 6374
  Synthetic polynucleotide

SEQ ID NO: 6376 - DNA, 191 bp, Artificial Sequence
  Synthetic polynucleotide
atcatctcaccttgcctcctggtgtgacgattactgtacctgcaggcgaattaattaaaaaccagacgaattaattaaaaacctcgcgaattaattaaaaaccgaccgaattaattaaaaaccctacgaattaattaaaaaccactcgaattaattaaaaacctgcggcgcgccatgcttcatcagactct

SEQ ID NO: 6377 - DNA, 191 bp, Artificial Sequence; identical to SEQ ID NO: 6376
  Synthetic polynucleotide

SEQ ID NO: 6378 - DNA, 191 bp, Artificial Sequence
  Synthetic polynucleotide
atcatctcaccttgcctcctgaagcagcacgataatttcctgcaggaatcgcactgcattccgagaaatcgcactgcattccgtcgaatcgcactgcattccggacaatcgcactgcattccgctaaatcgcactgcattccgactaatcgcactgcattccgtgcggcgcgccatgcttcatcagactct

SEQ ID NO: 6379 - DNA, 191 bp, Artificial Sequence; identical to SEQ ID NO: 6378
  Synthetic polynucleotide

SEQ ID NO: 6380 - DNA, 190 bp, Artificial Sequence
  Synthetic polynucleotide
atcatctcaccttgcctcctggccaatgtttaggtaggcctgcagggaaagtgaaagtgaagagaaagtgaaagtgatcggaaagtgaaagtgagacgaaagtgaaagtgactagaaagtgaaagtgaactgaaagtgaaagtgatgcgaaagtgaaagtgagtaggcgcgccatgcttcatcagactct

SEQ ID NO: 6381 - DNA, 190 bp, Artificial Sequence; identical to SEQ ID NO: 6380
  Synthetic polynucleotide

SEQ ID NO: 6382 - DNA, 190 bp, Artificial Sequence
  Synthetic polynucleotide
atcatctcaccttgcctcctgttaccacacacttagtccctgcagggtgttgtttacaacagagtgttgtttacaactcggtgttgtttacaacgacgtgttgtttacaacctagtgttgtttacaacactgtgttgtttacaactgcgtgttgtttacaacgtaggcgcgccatgcttcatcagactct

SEQ ID NO: 6383 - DNA, 190 bp, Artificial Sequence; identical to SEQ ID NO: 6382
  Synthetic polynucleotide

SEQ ID NO: 6384 - DNA, 197 bp, Artificial Sequence
  Synthetic polynucleotide
atcatctcaccttgcctcctgtcaatgggttgtgggatcctgcagggcgcagcggggggtcagagcgcagcggggggtctcggcgcagcggggggtcgacgcgcagcggggggtcctagcgcagcggggggtcactgcgcagcggggggtctgcgcgcagcggggggtcgtaggcgcgccatgcttcatcagactct

SEQ ID NO: 6385 - DNA, 197 bp, Artificial Sequence; identical to SEQ ID NO: 6384
  Synthetic polynucleotide

SEQ ID NO: 6386 - DNA, 148 bp, Artificial Sequence
  Synthetic polynucleotide
atcatctcaccttgcctcctgaccggccaagcacttaacctgcaggtaatctgagataatctgtcgtaatctggactaatctgctataatctgacttaatctgtgctaatctggtataatctgggcgcgccatgcttcatcagactct

SEQ ID NO: 6387 - DNA, 148 bp, Artificial Sequence; identical to SEQ ID NO: 6386
  Synthetic polynucleotide

SEQ ID NO: 6388 - DNA, 200 bp, Artificial Sequence
  Synthetic polynucleotide
atcatctcaccttgcctcctgttatcaccggcccaaagcctgcaggtctgcctagcaacaggtgaagatctgcctagcaacaggtgatcgtctgcctagcaacaggtgagactctgcctagcaacaggtgactatctgcctagcaacaggtgaacttctgcctagcaacaggtgaggcgcgccatgcttcatcagactct

SEQ ID NO: 6389 - DNA, 200 bp, Artificial Sequence; identical to SEQ ID NO: 6388
  Synthetic polynucleotide

SEQ ID NO: 6390 - DNA, 172 bp, Artificial Sequence
  Synthetic polynucleotide
atcatctcaccttgcctcctggtgccgaattggtgacccctgcaggccttataaggagaccttataaggtcgccttataagggacccttataaggctaccttataaggactccttataaggtgcccttataagggtaccttataaggggcgcgccatgcttcatcagactct

SEQ ID NO: 6391 - DNA, 172 bp, Artificial Sequence; identical to SEQ ID NO: 6390
  Synthetic polynucleotide

SEQ ID NO: 6392 - DNA, 172 bp, Artificial Sequence
  Synthetic polynucleotide
atcatctcaccttgcctcctgataacatcccacgtaaacctgcagggtgacgtagcagagtgacgtagctcggtgacgtagcgacgtgacgtagcctagtgacgtagcactgtgacgtagctgcgtgacgtagcgtagtgacgtagcggcgcgccatgcttcatcagactct

SEQ ID NO: 6393 - DNA, 172 bp, Artificial Sequence; identical to SEQ ID NO: 6392
  Synthetic polynucleotide

SEQ ID NO: 6394 - DNA, 156 bp, Artificial Sequence
  Synthetic polynucleotide
atcatctcaccttgcctcctgcgaacctaacagcgcatcctgcaggcacgtgtcagacacgtgtctcgcacgtgtcgaccacgtgtcctacacgtgtcactcacgtgtctgccacgtgtcgtacacgtgtcggcgcgccatgcttcatcagactct

SEQ ID NO: 6395 - DNA, 156 bp, Artificial Sequence; identical to SEQ ID NO: 6394
  Synthetic polynucleotide

SEQ ID NO: 6396 - DNA, 185 bp, Artificial Sequence
  Synthetic polynucleotide
atcatctcaccttgcctcctgaaacgtccttacacacccctgcaggtcacaccttcacacctagatcacaccttcacaccttcgtcacaccttcacacctgactcacaccttcacacctctatcacaccttcacacctacttcacaccttcacaccttgcggcgcgccatgcttcatcagactct

SEQ ID NO: 6397 - DNA, 185 bp, Artificial Sequence; identical to SEQ ID NO: 6396
  Synthetic polynucleotide

SEQ ID NO: 6398 - DNA, 172 bp, Artificial Sequence
  Synthetic polynucleotide
atcatctcaccttgcctcctgcctctgacatccttacacctgcaggccccacccccagaccccaccccctcgccccacccccgacccccacccccctaccccacccccactccccaccccctgcccccacccccgtaccccacccccggcgcgccatgcttcatcagactct

SEQ ID NO: 6399 - DNA, 172 bp, Artificial Sequence; identical to SEQ ID NO: 6398
  Synthetic polynucleotide

SEQ ID NO: 6400 - DNA, 188 bp, Artificial Sequence
  Synthetic polynucleotide
atcatctcaccttgcctcctgcgcagttcggaaaggagcctgcaggacggacacaatgagaacggacacaatgtcgacggacacaatggacacggacacaatgctaacggacacaatgactacggacacaatgtgcacggacacaatggtaacggacacaatgggcgcgccatgcttcatcagactct

SEQ ID NO: 6401 - DNA, 188 bp, Artificial Sequence; identical to SEQ ID NO: 6400
  Synthetic polynucleotide

SEQ ID NO: 6402 - DNA, 156 bp, Artificial Sequence
  Synthetic polynucleotide
atcatctcaccttgcctcctgtgaactcttagccatgccctgcaggcgtgggcgagacgtgggcgtcgcgtgggcggaccgtgggcgctacgtgggcgactcgtgggcgtgccgtgggcggtacgtgggcgggcgcgccatgcttcatcagactct

SEQ ID NO: 6403 - DNA, 156 bp, Artificial Sequence; identical to SEQ ID NO: 6402
  Synthetic polynucleotide

SEQ ID NO: 6404 - DNA, 191 bp, Artificial Sequence
  Synthetic polynucleotide
atcatctcaccttgcctcctgccatgagtttggccggacctgcaggcgaacccggaagtgaggagacgaacccggaagtgaggtcgcgaacccggaagtgagggaccgaacccggaagtgaggctacgaacccggaagtgaggactcgaacccggaagtgaggtgcggcgcgccatgcttcatcagactct

SEQ ID NO: 6405 - DNA, 191 bp, Artificial Sequence; identical to SEQ ID NO: 6404
  Synthetic polynucleotide

SEQ ID NO: 6406 - DNA, 197 bp, Artificial Sequence
  Synthetic polynucleotide
atcatctcaccttgcctcctgtgtctaaggactgctgtcctgcaggggaaagcgaaaccaaaacagaggaaagcgaaaccaaaactcgggaaagcgaaaccaaaacgacggaaagcgaaaccaaaacctaggaaagcgaaaccaaaacactggaaagcgaaaccaaaactgcggcgcgccatgcttcatcagactct

SEQ ID NO: 6407 - DNA, 197 bp, Artificial Sequence; identical to SEQ ID NO: 6406
  Synthetic polynucleotide

SEQ ID NO: 6408 - DNA, 185 bp, Artificial Sequence
  Synthetic polynucleotide
atcatctcaccttgcctcctgtactgtaggttggacttcctgcaggaatggcgtctggcattagaaatggcgtctggcatttcgaatggcgtctggcattgacaatggcgtctggcattctaaatggcgtctggcattactaatggcgtctggcatttgcggcgcgccatgcttcatcagactct

SEQ ID NO: 6409 - DNA, 185 bp, Artificial Sequence; identical to SEQ ID NO: 6408
  Synthetic polynucleotide

SEQ ID NO: 6410 - DNA, 197 bp, Artificial Sequence
  Synthetic polynucleotide
atcatctcaccttgcctcctgccagttaaacggagatacctgcaggaagaaaagaaaaaaaagaaagaaaagaaaaaaatcgaagaaaagaaaaaaagacaagaaaagaaaaaaactaaagaaaagaaaaaaaactaagaaaagaaaaaaatgcaagaaaagaaaaaaagtaggcgcgccatgcttcatcagactct

SEQ ID NO: 6411 - DNA, 197 bp, Artificial Sequence; identical to SEQ ID NO: 6410
  Synthetic polynucleotide

SEQ ID NO: 6412 - DNA, 172 bp, Artificial Sequence
  Synthetic polynucleotide
atcatctcaccttgcctcctgacgtttgcctaatggctcctgcagggccccgccccagagccccgcccctcggccccgccccgacgccccgccccctagccccgccccactgccccgcccctgcgccccgccccgtagccccgccccggcgcgccatgcttcatcagactct

SEQ ID NO: 6413 - DNA, 172 bp, Artificial Sequence; identical to SEQ ID NO: 6412
  Synthetic polynucleotide

SEQ ID NO: 6414 - DNA, 197 bp, Artificial Sequence
  Synthetic polynucleotide
atcatctcaccttgcctcctgagccaaagagactggagcctgcaggcccggtcacgtgaccagacccggtcacgtgacctcgcccggtcacgtgaccgaccccggtcacgtgaccctacccggtcacgtgaccactcccggtcacgtgacctgccccggtcacgtgaccgtaggcgcgccatgcttcatcagactct

SEQ ID NO: 6415 - DNA, 197 bp, Artificial Sequence; identical to SEQ ID NO: 6414
  Synthetic polynucleotide

SEQ ID NO: 6416 - DNA, 191 bp, Artificial Sequence
  Synthetic polynucleotide
atcatctcaccttgcctcctggcctggttaaggaaccgcctgcaggctcgggcgccccctggtggccagactcgggcgccccctggtggcctcgctcgggcgccccctggtggccgacctcgggcgccccctggtggccctactcgggcgccccctggtggccactggcgcgccatgcttcatcagactct

SEQ ID NO: 6417 - DNA, 191 bp, Artificial Sequence; identical to SEQ ID NO: 6416
  Synthetic polynucleotide

SEQ ID NO: 6418 - DNA, 191 bp, Artificial Sequence
  Synthetic polynucleotide
atcatctcaccttgcctcctgcggtttcccagtgtgctcctgcaggacggctagttaacagctagaacggctagttaacagcttcgacggctagttaacagctgacacggctagttaacagctctaacggctagttaacagctactacggctagttaacagcttgcggcgcgccatgcttcatcagactct

SEQ ID NO: 6419 - DNA, 191 bp, Artificial Sequence; identical to SEQ ID NO: 6418
  Synthetic polynucleotide

SEQ ID NO: 6420 - DNA, 197 bp, Artificial Sequence
  Synthetic polynucleotide
atcatctcaccttgcctcctgtgtacctatgcgcccgacctgcaggttgctgactcagcaaagattgctgactcagcaatcgttgctgactcagcaagacttgctgactcagcaactattgctgactcagcaaactttgctgactcagcaatgcttgctgactcagcaagtaggcgcgccatgcttcatcagactct

SEQ ID NO: 6421 - DNA, 197 bp, Artificial Sequence; identical to SEQ ID NO: 6420
  Synthetic polynucleotide

SEQ ID NO: 6422 - DNA, 180 bp, Artificial Sequence
  Synthetic polynucleotide
atcatctcaccttgcctcctgggacccgagaattgaatcctgcaggaaaatggcggtagaaaaatggcggttcgaaaatggcggtgacaaaatggcggtctaaaaatggcggtactaaaatggcggttgcaaaatggcggtgtaaaaatggcggtggcgcgccatgcttcatcagactct

SEQ ID NO: 6423 - DNA, 180 bp, Artificial Sequence; identical to SEQ ID NO: 6422
  Synthetic polynucleotide

SEQ ID NO: 6424 - DNA, 164 bp, Artificial Sequence
  Synthetic polynucleotide
atcatctcaccttgcctcctgtatagggacaacgacggcctgcagggaacaatggagagaacaatggtcggaacaatgggacgaacaatggctagaacaatggactgaacaatggtgcgaacaatgggtagaacaatggggcgcgccatgcttcatcagactct

SEQ ID NO: 6425 - DNA, 164 bp, Artificial Sequence; identical to SEQ ID NO: 6424
  Synthetic polynucleotide

SEQ ID NO: 6426 - DNA, 180 bp, Artificial Sequence
  Synthetic polynucleotide
atcatctcaccttgcctcctggaggcaattcggctccacctgcaggtcttcacacctagatcttcacaccttcgtcttcacacctgactcttcacacctctatcttcacacctacttcttcacaccttgctcttcacacctgtatcttcacacctggcgcgccatgcttcatcagactct

SEQ ID NO: 6427 - DNA, 180 bp, Artificial Sequence; identical to SEQ ID NO: 6426
  Synthetic polynucleotide

SEQ ID NO: 6428 - DNA, 156 bp, Artificial Sequence
  Synthetic polynucleotide
atcatctcaccttgcctcctgtttacggttgcaaacgccctgcaggcacgtgttagacacgtgtttcgcacgtgttgaccacgtgttctacacgtgttactcacgtgtttgccacgtgttgtacacgtgttggcgcgccatgcttcatcagactct

SEQ ID NO: 6429 - DNA, 156 bp, Artificial Sequence; identical to SEQ ID NO: 6428
  Synthetic polynucleotide

SEQ ID NO: 6430 - DNA, 190 bp, Artificial Sequence
  Synthetic polynucleotide
atcatctcaccttgcctcctgacagcagattgactccccctgcaggatgatcgaatcaaaagaatgatcgaatcaaatcgatgatcgaatcaaagacatgatcgaatcaaactaatgatcgaatcaaaactatgatcgaatcaaatgcatgatcgaatcaaagtaggcgcgccatgcttcatcagactct

SEQ ID NO: 6431 - DNA, 190 bp, Artificial Sequence; identical to SEQ ID NO: 6430
  Synthetic polynucleotide

SEQ ID NO: 6432 - DNA, 200 bp, Artificial Sequence
  Synthetic polynucleotide
atcatctcaccttgcctcctgtgcccactttgttctcccctgcaggaaagaggaagtgaaactagagaaaagaggaagtgaaactagtcgaaagaggaagtgaaactaggacaaagaggaagtgaaactagctaaaagaggaagtgaaactagactaaagaggaagtgaaactagggcgcgccatgcttcatcagactct

SEQ ID NO: 6433 - DNA, 200 bp, Artificial Sequence; identical to SEQ ID NO: 6432
  Synthetic polynucleotide

SEQ ID NO: 6434 - DNA, 172 bp, Artificial Sequence
  Synthetic polynucleotide
atcatctcaccttgcctcctggagttgccttaagtttccctgcaggaaagataagcagaaaagataagctcgaaagataagcgacaaagataagcctaaaagataagcactaaagataagctgcaaagataagcgtaaaagataagcggcgcgccatgcttcatcagactct

SEQ ID NO: 6435 - DNA, 172 bp, Artificial Sequence; identical to SEQ ID NO: 6434
  Synthetic polynucleotide

SEQ ID NO: 6436 - DNA, 148 bp, Artificial Sequence
  Synthetic polynucleotide
atcatctcaccttgcctcctgatttagggctacattgacctgcaggcacttaaagacacttaatcgcacttaagaccacttaactacacttaaactcacttaatgccacttaagtacacttaaggcgcgccatgcttcatcagactct

SEQ ID NO: 6437 - DNA, 148 bp, Artificial Sequence; identical to SEQ ID NO: 6436
  Synthetic polynucleotide

SEQ ID NO: 6438 - DNA, 197 bp, Artificial Sequence
  Synthetic polynucleotide
atcatctcaccttgcctcctggtaggttctccagctttcctgcaggctgatttgcatattcagactgatttgcatattctcgctgatttgcatattcgacctgatttgcatattcctactgatttgcatattcactctgatttgcatattctgcctgatttgcatattcgtaggcgcgccatgcttcatcagactct

SEQ ID NO: 6439 - DNA, 197 bp, Artificial Sequence; identical to SEQ ID NO: 6438
  Synthetic polynucleotide

SEQ ID NO: 6440 - DNA, 190 bp, Artificial Sequence
  Synthetic polynucleotide
atcatctcaccttgcctcctggcttgacgaagtgccaccctgcagggctgtccctggtgcagagctgtccctggtgctcggctgtccctggtgcgacgctgtccctggtgcctagctgtccctggtgcactgctgtccctggtgctgcgctgtccctggtgcgtaggcgcgccatgcttcatcagactct

SEQ ID NO: 6441 - DNA, 190 bp, Artificial Sequence; identical to SEQ ID NO: 6440
  Synthetic polynucleotide

SEQ ID NO: 6442 - DNA, 180 bp, Artificial Sequence
  Synthetic polynucleotide
atcatctcaccttgcctcctggtacctcctgagagtcacctgcaggtattgcacaatagatattgcacaattcgtattgcacaatgactattgcacaatctatattgcacaatacttattgcacaattgctattgcacaatgtatattgcacaatggcgcgccatgcttcatcagactct

SEQ ID NO: 6443 - DNA, 180 bp, Artificial Sequence; identical to SEQ ID NO: 6442
  Synthetic polynucleotide

SEQ ID NO: 6444 - DNA, 172 bp, Artificial Sequence
  Synthetic polynucleotide
atcatctcaccttgcctcctgttaatgcctctaatgaccctgcaggtttcacttccagatttcacttcctcgtttcacttccgactttcacttccctatttcacttccacttttcacttcctgctttcacttccgtatttcacttccggcgcgccatgcttcatcagactct

SEQ ID NO: 6445 - DNA, 172 bp, Artificial Sequence; identical to SEQ ID NO: 6444
  Synthetic polynucleotide

SEQ ID NO: 6446 - DNA, 191 bp, Artificial Sequence
  Synthetic polynucleotide
atcatctcaccttgcctcctgcggaatggtgtggctcacctgcaggttaggtcgtaaaatttcagattaggtcgtaaaatttctcgttaggtcgtaaaatttcgacttaggtcgtaaaatttcctattaggtcgtaaaatttcactttaggtcgtaaaatttctgcggcgcgccatgcttcatcagactct

SEQ ID NO: 6447 - DNA, 191 bp, Artificial Sequence; identical to SEQ ID NO: 6446
  Synthetic polynucleotide

SEQ ID NO: 6448 - DNA, 180 bp, Artificial Sequence
  Synthetic polynucleotide
atcatctcaccttgcctcctggcgtttggctatcctcacctgcaggttccattgtttagattccattgttttcgttccattgtttgacttccattgtttctattccattgtttactttccattgttttgcttccattgtttgtattccattgtttggcgcgccatgcttcatcagactct

SEQ ID NO: 6449 - DNA, 180 bp, Artificial Sequence; identical to SEQ ID NO: 6448
  Synthetic polynucleotide

SEQ ID NO: 6450 - DNA, 191 bp, Artificial Sequence
  Synthetic polynucleotide
atcatctcaccttgcctcctgacctcacgatggtctagcctgcaggcgaattaattaataatgagacgaattaattaataatgtcgcgaattaattaataatggaccgaattaattaataatgctacgaattaattaataatgactcgaattaattaataatgtgcggcgcgccatgcttcatcagactct

SEQ ID NO: 6451 - DNA, 191 bp, Artificial Sequence; identical to SEQ ID NO: 6450
  Synthetic polynucleotide

SEQ ID NO: 6452 - DNA, 188 bp, Artificial Sequence
  Synthetic polynucleotide
atcatctcaccttgcctcctgggctattagcctccttacctgcagggcctcccacgccagagcctcccacgcctcggcctcccacgccgacgcctcccacgccctagcctcccacgccactgcctcccacgcctgcgcctcccacgccgtagcctcccacgccggcgcgccatgcttcatcagactct

SEQ ID NO: 6453 - DNA, 188 bp, Artificial Sequence; identical to SEQ ID NO: 6452
  Synthetic polynucleotide

SEQ ID NO: 6454 - DNA, 188 bp, Artificial Sequence
  Synthetic polynucleotide
atcatctcaccttgcctcctgctcacggatacaacggccctgcaggcagcacctggcgagacagcacctggcgtcgcagcacctggcggaccagcacctggcgctacagcacctggcgactcagcacctggcgtgccagcacctggcggtacagcacctggcgggcgcgccatgcttcatcagactct

SEQ ID NO: 6455 - DNA, 188 bp, Artificial Sequence; identical to SEQ ID NO: 6454
  Synthetic polynucleotide

SEQ ID NO: 6456 - DNA, 180 bp, Artificial Sequence
  Synthetic polynucleotide
atcatctcaccttgcctcctggtcgtgggtaaccgtgacctgcaggaaaatggcggcagaaaaatggcggctcgaaaatggcggcgacaaaatggcggcctaaaaatggcggcactaaaatggcggctgcaaaatggcggcgtaaaaatggcggcggcgcgccatgcttcatcagactct

SEQ ID NO: 6457 - DNA, 180 bp, Artificial Sequence; identical to SEQ ID NO: 6456
  Synthetic polynucleotide

SEQ ID NO: 6458 - DNA, 185 bp, Artificial Sequence
  Synthetic polynucleotide
atcatctcaccttgcctcctggaattgggtcttcatctcctgcaggatgcataattaatgagagaatgcataattaatgagtcgatgcataattaatgaggacatgcataattaatgagctaatgcataattaatgagactatgcataattaatgagtgcggcgcgccatgcttcatcagactct

SEQ ID NO: 6459 - DNA, 185 bp, Artificial Sequence; identical to SEQ ID NO: 6458
  Synthetic polynucleotide

SEQ ID NO: 6460 - DNA, 148 bp, Artificial Sequence
  Synthetic polynucleotide
atcatctcaccttgcctcctgacttacgtgtaaccttgcctgcaggttaagtgagattaagtgtcgttaagtggacttaagtgctattaagtgactttaagtgtgcttaagtggtattaagtgggcgcgccatgcttcatcagactct

SEQ ID NO: 6461 - DNA, 148 bp, Artificial Sequence; identical to SEQ ID NO: 6460
  Synthetic polynucleotide

SEQ ID NO: 6462 - DNA, 190 bp, Artificial Sequence
  Synthetic polynucleotide
atcatctcaccttgcctcctgacctgtattgtggtagccctgcaggccatcgatccccctagaccatcgatcccccttcgccatcgatccccctgacccatcgatccccctctaccatcgatccccctactccatcgatcccccttgcccatcgatccccctgtaggcgcgccatgcttcatcagactct

SEQ ID NO: 6463 - DNA, 190 bp, Artificial Sequence; identical to SEQ ID NO: 6462
  Synthetic polynucleotide

SEQ ID NO: 6464 - DNA, 197 bp, Artificial Sequence
  Synthetic polynucleotide
atcatctcaccttgcctcctgtagatgcaagtaatgcacctgcagggcacccctgggtgccagagcacccctgggtgcctcggcacccctgggtgccgacgcacccctgggtgccctagcacccctgggtgccactgcacccctgggtgcctgcgcacccctgggtgccgtaggcgcgccatgcttcatcagactct

SEQ ID NO: 6465 - DNA, 197 bp, Artificial Sequence; identical to SEQ ID NO: 6464
  Synthetic polynucleotide

SEQ ID NO: 6466 - DNA, 180 bp, Artificial Sequence
  Synthetic polynucleotide
atcatctcaccttgcctcctggcagggtcccaaacgaacctgcaggttaagcaaacaagattaagcaaacatcgttaagcaaacagacttaagcaaacactattaagcaaacaactttaagcaaacatgcttaagcaaacagtattaagcaaacaggcgcgccatgcttcatcagactct

SEQ ID NO: 6467 - DNA, 180 bp, Artificial Sequence; identical to SEQ ID NO: 6466
  Synthetic polynucleotide

SEQ ID NO: 6468 - DNA, 172 bp, Artificial Sequence
  Synthetic polynucleotide
atcatctcaccttgcctcctgttattcggtccggaaatcctgcagggggccccccgagagggccccccgtcggggccccccggacgggccccccgctagggccccccgactgggccccccgtgcgggccccccggtagggccccccgggcgcgccatgcttcatcagactct

SEQ ID NO: 6469 - DNA, 172 bp, Artificial Sequence; identical to SEQ ID NO: 6468
  Synthetic polynucleotide

SEQ ID NO: 6470 - DNA, 197 bp, Artificial Sequence
  Synthetic polynucleotide
atcatctcaccttgcctcctgcatagtgcaacatggtccctgcaggaaatatgcaaatcacagaaaatatgcaaatcactcgaaatatgcaaatcacgacaaatatgcaaatcacctaaaatatgcaaatcacactaaatatgcaaatcactgcaaatatgcaaatcacgtaggcgcgccatgcttcatcagactct

SEQ ID NO: 6471 - DNA, 197 bp, Artificial Sequence; identical to SEQ ID NO: 6470
  Synthetic polynucleotide

SEQ ID NO: 6472 - DNA, 148 bp, Artificial Sequence
  Synthetic polynucleotide
atcatctcaccttgcctcctgggtcacaagagctaagccctgcaggttcacttagattcactttcgttcacttgacttcacttctattcacttactttcactttgcttcacttgtattcacttggcgcgccatgcttcatcagactct

SEQ ID NO: 6473 - DNA, 148 bp, Artificial Sequence; identical to SEQ ID NO: 6472
  Synthetic polynucleotide

SEQ ID NO: 6474 - DNA, 148 bp, Artificial Sequence
  Synthetic polynucleotide
atcatctcaccttgcctcctgggcccgtgagcttattacctgcaggtgataccagatgatacctcgtgataccgactgataccctatgataccacttgatacctgctgataccgtatgataccggcgcgccatgcttcatcagactct

SEQ ID NO: 6475 - DNA, 148 bp, Artificial Sequence; identical to SEQ ID NO: 6474
  Synthetic polynucleotide

SEQ ID NO: 6476 - DNA, 191 bp, Artificial Sequence
  Synthetic polynucleotide
atcatctcaccttgcctcctgttgctcgaaagtagcttcctgcaggaaatctattgttcactaagaaaatctattgttcactatcgaaatctattgttcactagacaaatctattgttcactactaaaatctattgttcactaactaaatctattgttcactatgcggcgcgccatgcttcatcagactct

SEQ ID NO: 6477 - DNA, 191 bp, Artificial Sequence; identical to SEQ ID NO: 6476
  Synthetic polynucleotide

SEQ ID NO: 6478 - DNA, 196 bp, Artificial Sequence
  Synthetic polynucleotide
atcatctcaccttgcctcctgagtcggatctatacaggcctgcaggtcccagaaaagtcagatcccagaaaagtctcgtcccagaaaagtcgactcccagaaaagtcctatcccagaaaagtcacttcccagaaaagtctgctcccagaaaagtcgtatcccagaaaagtcggcgcgccatgcttcatcagactct

SEQ ID NO: 6479 - DNA, 196 bp, Artificial Sequence; identical to SEQ ID NO: 6478
  Synthetic polynucleotide

SEQ ID NO: 6480 - DNA, 190 bp, Artificial Sequence
  Synthetic polynucleotide
atcatctcaccttgcctcctggacactagcacgggctacctgcaggacgaaagcgaaagtagaacgaaagcgaaagttcgacgaaagcgaaagtgacacgaaagcgaaagtctaacgaaagcgaaagtactacgaaagcgaaagttgcacgaaagcgaaagtgtaggcgcgccatgcttcatcagactct

SEQ ID NO: 6481 - DNA, 190 bp, Artificial Sequence; identical to SEQ ID NO: 6480
  Synthetic polynucleotide

SEQ ID NO: 6482 - DNA, 156 bp, Artificial Sequence
  Synthetic polynucleotide
atcatctcaccttgcctcctgtgagttcatgctaccgacctgcaggttgtaattagattgtaatttcgttgtaattgacttgtaattctattgtaattactttgtaatttgcttgtaattgtattgtaattggcgcgccatgcttcatcagactct

SEQ ID NO: 6483 - DNA, 156 bp, Artificial Sequence; identical to SEQ ID NO: 6482
  Synthetic polynucleotide

SEQ ID NO: 6484 - DNA, 185 bp, Artificial Sequence
  Synthetic polynucleotide
atcatctcaccttgcctcctgctttaccatgtctacggcctgcaggtaattggtgttaaatgagataattggtgttaaatgtcgtaattggtgttaaatggactaattggtgttaaatgctataattggtgttaaatgacttaattggtgttaaatgtgcggcgcgccatgcttcatcagactct

SEQ ID NO: 6485 - DNA, 185 bp, Artificial Sequence; identical to SEQ ID NO: 6484
  Synthetic polynucleotide

SEQ ID NO: 6486 - DNA, 191 bp, Artificial Sequence
  Synthetic polynucleotide
atcatctcaccttgcctcctgctcaagctagtctactgcctgcaggtttctctccagtatgaaagatttctctccagtatgaatcgtttctctccagtatgaagactttctctccagtatgaactatttctctccagtatgaaacttttctctccagtatgaatgcggcgcgccatgcttcatcagactct

SEQ ID NO: 6487 - DNA, 191 bp, Artificial Sequence; identical to SEQ ID NO: 6486
  Synthetic polynucleotide

SEQ ID NO: 6488 - DNA, 191 bp, Artificial Sequence
  Synthetic polynucleotide
atcatctcaccttgcctcctgctctcggtattacaatgcctgcaggggtttttaattaattcgagaggtttttaattaattcgtcgggtttttaattaattcggacggtttttaattaattcgctaggtttttaattaattcgactggtttttaattaattcgtgcggcgcgccatgcttcatcagactct

SEQ ID NO: 6489 - DNA, 191 bp, Artificial Sequence; identical to SEQ ID NO: 6488
  Synthetic polynucleotide

SEQ ID NO: 6490 - DNA, 197 bp, Artificial Sequence
  Synthetic polynucleotide
atcatctcaccttgcctcctgtatgtcgccagacatgtcctgcaggttggccccgcccactagattggccccgcccacttcgttggccccgcccactgacttggccccgcccactctattggccccgcccactactttggccccgcccacttgcttggccccgcccactgtaggcgcgccatgcttcatcagactct

SEQ ID NO: 6491 - DNA, 197 bp, Artificial Sequence; identical to SEQ ID NO: 6490
  Synthetic polynucleotide

SEQ ID NO: 6492 - DNA, 156 bp, Artificial Sequence
  Synthetic polynucleotide
atcatctcaccttgcctcctgcattgctgtcttaatgtcctgcaggcacctgccagacacctgcctcgcacctgccgaccacctgccctacacctgccactcacctgcctgccacctgccgtacacctgccggcgcgccatgcttcatcagactct

SEQ ID NO: 6493 - DNA, 156 bp, Artificial Sequence; identical to SEQ ID NO: 6492
  Synthetic polynucleotide

SEQ ID NO: 6494 - DNA, 180 bp, Artificial Sequence
  Synthetic polynucleotide
atcatctcaccttgcctcctgtgttattgtcaacgggtcctgcaggtgttacataacagatgttacataactcgtgttacataacgactgttacataacctatgttacataacacttgttacataactgctgttacataacgtatgttacataacggcgcgccatgcttcatcagactct

SEQ ID NO: 6495 - DNA, 180 bp, Artificial Sequence; identical to SEQ ID NO: 6494
  Synthetic polynucleotide

SEQ ID NO: 6496 - DNA, 191 bp, Artificial Sequence
  Synthetic polynucleotide
atcatctcaccttgcctcctgccagagtcaccgactaacctgcaggtccctttacagcgtcctagatccctttacagcgtccttcgtccctttacagcgtcctgactccctttacagcgtcctctatccctttacagcgtcctacttccctttacagcgtccttgcggcgcgccatgcttcatcagactct

SEQ ID NO: 6497 - DNA, 191 bp, Artificial Sequence; identical to SEQ ID NO: 6496
  Synthetic polynucleotide

SEQ ID NO: 6498 - DNA, 190 bp, Artificial Sequence
  Synthetic polynucleotide
atcatctcaccttgcctcctgtatatcaggctgaccttcctgcagggagttgtgcaatatagagagttgtgcaatattcggagttgtgcaatatgacgagttgtgcaatatctagagttgtgcaatatactgagttgtgcaatattgcgagttgtgcaatatgtaggcgcgccatgcttcatcagactct

SEQ ID NO: 6499 - DNA, 190 bp, Artificial Sequence; identical to SEQ ID NO: 6498
  Synthetic polynucleotide

SEQ ID NO: 6500 - DNA, 191 bp, Artificial Sequence
  Synthetic polynucleotide
atcatctcaccttgcctcctgaatagcagctagagaaccctgcaggtcaattaattaatggatagatcaattaattaatggattcgtcaattaattaatggatgactcaattaattaatggatctatcaattaattaatggatacttcaattaattaatggattgcggcgcgccatgcttcatcagactct

SEQ ID NO: 6501 - DNA, 191 bp, Artificial Sequence; identical to SEQ ID NO: 6500
  Synthetic polynucleotide

SEQ ID NO: 6502 - DNA, 190 bp, Artificial Sequence
  Synthetic polynucleotide
atcatctcaccttgcctcctgagctgcgtacaaacagtcctgcaggggttgccatggtaaagaggttgccatggtaatcgggttgccatggtaagacggttgccatggtaactaggttgccatggtaaactggttgccatggtaatgcggttgccatggtaagtaggcgcgccatgcttcatcagactct

SEQ ID NO: 6503 - DNA, 190 bp, Artificial Sequence; identical to SEQ ID NO: 6502
  Synthetic polynucleotide

SEQ ID NO: 6504 - DNA, 190 bp, Artificial Sequence
  Synthetic polynucleotide
atcatctcaccttgcctcctgcaagtactcctgtatcgcctgcagggcggtaatcttcctagagcggtaatcttccttcggcggtaatcttcctgacgcggtaatcttcctctagcggtaatcttcctactgcggtaatcttccttgcgcggtaatcttcctgtaggcgcgccatgcttcatcagactct

SEQ ID NO: 6505 - DNA, 190 bp, Artificial Sequence; identical to SEQ ID NO: 6504
  Synthetic polynucleotide

SEQ ID NO: 6506 - DNA, 190 bp, Artificial Sequence
  Synthetic polynucleotide
atcatctcaccttgcctcctgaacgtattaccgtagtccctgcagggtgccacgtcatcaagagtgccacgtcatcatcggtgccacgtcatcagacgtgccacgtcatcactagtgccacgtcatcaactgtgccacgtcatcatgcgtgccacgtcatcagtaggcgcgccatgcttcatcagactct

SEQ ID NO: 6507 - DNA, 190 bp, Artificial Sequence; identical to SEQ ID NO: 6506
  Synthetic polynucleotide

SEQ ID NO: 6508 - DNA, 200 bp, Artificial Sequence
  Synthetic polynucleotide
atcatctcaccttgcctcctgctctttaagctgcatctcctgcaggtgccaacttccccattagtggtcgcctccaagatgccaacttccccattagtggtcgcctccatcgtgccaacttccccattagtggtcgcctccagactgccaacttccccattagtggtcgcctccaggcgcgccatgcttcatcagactct

SEQ ID NO: 6509 - DNA, 200 bp, Artificial Sequence; identical to SEQ ID NO: 6508
  Synthetic polynucleotide

SEQ ID NO: 6510 - DNA, 180 bp, Artificial Sequence
  Synthetic polynucleotide
atcatctcaccttgcctcctgatcctgtgcaactcattcctgcaggcgccaaggagcagacgccaaggagctcgcgccaaggagcgaccgccaaggagcctacgccaaggagcactcgccaaggagctgccgccaaggagcgtacgccaaggagcggcgcgccatgcttcatcagactct

SEQ ID NO: 6511 - DNA, 180 bp, Artificial Sequence; identical to SEQ ID NO: 6510
  Synthetic polynucleotide

SEQ ID NO: 6512 - DNA, 197 bp, Artificial Sequence
  Synthetic polynucleotide
atcatctcaccttgcctcctgaaggaactgaagcgccgcctgcaggcgtcgccatggcaacagacgtcgccatggcaactcgcgtcgccatggcaacgaccgtcgccatggcaacctacgtcgccatggcaacactcgtcgccatggcaactgccgtcgccatggcaacgtaggcgcgccatgcttcatcagactct

SEQ ID NO: 6513 - DNA, 197 bp, Artificial Sequence; identical to SEQ ID NO: 6512
  Synthetic polynucleotide

SEQ ID NO: 6514 - DNA, 185 bp, Artificial Sequence
  Synthetic polynucleotide
atcatctcaccttgcctcctgatttgtcagtcgttactcctgcaggtaattgctgctaaatgagataattgctgctaaatgtcgtaattgctgctaaatggactaattgctgctaaatgctataattgctgctaaatgacttaattgctgctaaatgtgcggcgcgccatgcttcatcagactct

SEQ ID NO: 6515 - DNA, 185 bp, Artificial Sequence; identical to SEQ ID NO: 6514
  Synthetic polynucleotide

SEQ ID NO: 6516 - DNA, 164 bp, Artificial Sequence
  Synthetic polynucleotide
atcatctcaccttgcctcctgcacctggccacagaaatcctgcaggcaaggtcatagacaaggtcattcgcaaggtcatgaccaaggtcatctacaaggtcatactcaaggtcattgccaaggtcatgtacaaggtcatggcgcgccatgcttcatcagactct

SEQ ID NO: 6517 - DNA, 164 bp, Artificial Sequence; identical to SEQ ID NO: 6516
  Synthetic polynucleotide

SEQ ID NO: 6518 - DNA, 197 bp, Artificial Sequence
  Synthetic polynucleotide
atcatctcaccttgcctcctgttagttcatgttggatgcctgcaggccccgccttttatacagaccccgccttttatactcgccccgccttttatacgacccccgccttttatacctaccccgccttttatacactccccgccttttatactgcccccgccttttatacgtaggcgcgccatgcttcatcagactct

SEQ ID NO: 6519 - DNA, 197 bp, Artificial Sequence; identical to SEQ ID NO: 6518
  Synthetic polynucleotide

SEQ ID NO: 6520 - DNA, 200 bp, Artificial Sequence
  Synthetic polynucleotide
atcatctcaccttgcctcctgtcaccagtgggataacccctgcaggtcttgacctttgaccctgtagatcttgacctttgaccctgttcgtcttgacctttgaccctgtgactcttgacctttgaccctgtctatcttgacctttgaccctgtacttcttgacctttgaccctgtggcgcgccatgcttcatcagactct

SEQ ID NO: 6521 - DNA, 200 bp, Artificial Sequence; identical to SEQ ID NO: 6520
  Synthetic polynucleotide

SEQ ID NO: 6522 - DNA, 164 bp, Artificial Sequence
  Synthetic polynucleotide
atcatctcaccttgcctcctgtgggcagtgaaccctctcctgcaggttgtttatcagattgtttatctcgttgtttatcgacttgtttatcctattgtttatcactttgtttatctgcttgtttatcgtattgtttatcggcgcgccatgcttcatcagactct

SEQ ID NO: 6523 - DNA, 164 bp, Artificial Sequence; identical to SEQ ID NO: 6522
  Synthetic polynucleotide

SEQ ID NO: 6524 - DNA, 191 bp, Artificial Sequence
  Synthetic polynucleotide
atcatctcaccttgcctcctggtactgcttccggtcttcctgcagggatcactgcaattgatgagagatcactgcaattgatgtcggatcactgcaattgatggacgatcactgcaattgatgctagatcactgcaattgatgactgatcactgcaattgatgtgcggcgcgccatgcttcatcagactct

SEQ ID NO: 6525 - DNA, 191 bp, Artificial Sequence; identical to SEQ ID NO: 6524
  Synthetic polynucleotide

SEQ ID NO: 6526 - DNA, 164 bp, Artificial Sequence
  Synthetic polynucleotide
atcatctcaccttgcctcctggacttagagcaaccggtcctgcaggacagataacagaacagataactcgacagataacgacacagataacctaacagataacactacagataactgcacagataacgtaacagataacggcgcgccatgcttcatcagactct

SEQ ID NO: 6527 - DNA, 164 bp, Artificial Sequence; identical to SEQ ID NO: 6526
  Synthetic polynucleotide

SEQ ID NO: 6528 - DNA, 148 bp, Artificial Sequence
  Synthetic polynucleotide
atcatctcaccttgcctcctgaaggatttctaagcagccctgcaggtgataagagatgataagtcgtgataaggactgataagctatgataagacttgataagtgctgataaggtatgataagggcgcgccatgcttcatcagactct

SEQ ID NO: 6529 - DNA, 148 bp, Artificial Sequence; identical to SEQ ID NO: 6528
  Synthetic polynucleotide

SEQ ID NO: 6530 - DNA, 186 bp, Artificial Sequence
  Synthetic polynucleotide
atcatctcaccttgcctcctgcagaccttattagactgcctgcaggggcccaggtcaccctgacctagaggcccaggtcaccctgaccttcgggcccaggtcaccctgacctgacggcccaggtcaccctgacctctaggcccaggtcaccctgacctactggcgcgccatgcttcatcagactct

SEQ ID NO: 6531 - DNA, 186 bp, Artificial Sequence; identical to SEQ ID NO: 6530
  Synthetic polynucleotide

SEQ ID NO: 6532 - DNA, 188 bp, Artificial Sequence
  Synthetic polynucleotide
atcatctcaccttgcctcctgtcggtcccgcaatactgcctgcaggtgcacttccggtagatgcacttccggttcgtgcacttccggtgactgcacttccggtctatgcacttccggtacttgcacttccggttgctgcacttccggtgtatgcacttccggtggcgcgccatgcttcatcagactct

SEQ ID NO: 6533 - DNA, 188 bp, Artificial Sequence; identical to SEQ ID NO: 6532
  Synthetic polynucleotide

SEQ ID NO: 6534 - DNA, 191 bp, Artificial Sequence
  Synthetic polynucleotide
atcatctcaccttgcctcctggtgcggtctatgtaccccctgcaggccctgccccccccttccagaccctgccccccccttcctcgccctgccccccccttccgacccctgccccccccttccctaccctgccccccccttccactccctgccccccccttcctgcggcgcgccatgcttcatcagactct

SEQ ID NO: 6535 - DNA, 191 bp, Artificial Sequence; identical to SEQ ID NO: 6534
  Synthetic polynucleotide

SEQ ID NO: 6536 - DNA, 172 bp, Artificial Sequence
  Synthetic polynucleotide
atcatctcaccttgcctcctgcatcgagacgtcaatagcctgcaggaggaagtgaaagaaggaagtgaatcgaggaagtgaagacaggaagtgaactaaggaagtgaaactaggaagtgaatgcaggaagtgaagtaaggaagtgaaggcgcgccatgcttcatcagactct

SEQ ID NO: 6537 - DNA, 172 bp, Artificial Sequence; identical to SEQ ID NO: 6536
  Synthetic polynucleotide

SEQ ID NO: 6538 - DNA, 180 bp, Artificial Sequence
  Synthetic polynucleotide
atcatctcaccttgcctcctgaaggtgcagaccagtaccctgcagggaggggccggcagagaggggccggctcggaggggccggcgacgaggggccggcctagaggggccggcactgaggggccggctgcgaggggccggcgtagaggggccggcggcgcgccatgcttcatcagactct

SEQ ID NO: 6539 - DNA, 180 bp, Artificial Sequence; identical to SEQ ID NO: 6538
  Synthetic polynucleotide

SEQ ID NO: 6540 - DNA, 164 bp, Artificial Sequence
  Synthetic polynucleotide
atcatctcaccttgcctcctgtgaacctgatctcgatccctgcaggttgtttattagattgtttatttcgttgtttattgacttgtttattctattgtttattactttgtttatttgcttgtttattgtattgtttattggcgcgccatgcttcatcagactct

SEQ ID NO: 6541 - DNA, 164 bp, Artificial Sequence; identical to SEQ ID NO: 6540
  Synthetic polynucleotide

SEQ ID NO: 6542 - DNA, 156 bp, Artificial Sequence
  Synthetic polynucleotide
atcatctcaccttgcctcctgttctgagaataccggcacctgcaggcctttgaaagacctttgaatcgcctttgaagaccctttgaactacctttgaaactcctttgaatgccctttgaagtacctttgaaggcgcgccatgcttcatcagactct

SEQ ID NO: 6543 - DNA, 156 bp, Artificial Sequence; identical to SEQ ID NO: 6542
  Synthetic polynucleotide

SEQ ID NO: 6544 - DNA, 180 bp, Artificial Sequence
  Synthetic polynucleotide
atcatctcaccttgcctcctggtgtgcctgagatgcaacctgcagggtgggcgtggcagagtgggcgtggctcggtgggcgtggcgacgtgggcgtggcctagtgggcgtggcactgtgggcgtggctgcgtgggcgtggcgtagtgggcgtggcggcgcgccatgcttcatcagactct

SEQ ID NO: 6545 - DNA, 180 bp, Artificial Sequence; identical to SEQ ID NO: 6544
  Synthetic polynucleotide

SEQ ID NO: 6546 - DNA, 156 bp, Artificial Sequence
  Synthetic polynucleotide
atcatctcaccttgcctcctggcattgttgcatagagtcctgcaggcttatcagagacttatcagtcgcttatcaggaccttatcagctacttatcagactcttatcagtgccttatcaggtacttatcagggcgcgccatgcttcatcagactct

SEQ ID NO: 6547 - DNA, 156 bp, Artificial Sequence; identical to SEQ ID NO: 6546
  Synthetic polynucleotide

SEQ ID NO: 6548 - DNA, 172 bp, Artificial Sequence
  Synthetic polynucleotide
atcatctcaccttgcctcctggcaatgactatgaggagcctgcaggcgcatgcgcaagacgcatgcgcatcgcgcatgcgcagaccgcatgcgcactacgcatgcgcaactcgcatgcgcatgccgcatgcgcagtacgcatgcgcaggcgcgccatgcttcatcagactct

SEQ ID NO: 6549 - DNA, 172 bp, Artificial Sequence; identical to SEQ ID NO: 6548
  Synthetic polynucleotide

SEQ ID NO: 6550 - DNA, 190 bp, Artificial Sequence
  Synthetic polynucleotide
atcatctcaccttgcctcctgacgatacggtgctgcaccctgcaggtctgattggttagtagatctgattggttagttcgtctgattggttagtgactctgattggttagtctatctgattggttagtacttctgattggttagttgctctgattggttagtgtaggcgcgccatgcttcatcagactct

SEQ ID NO: 6551 - DNA, 190 bp, Artificial Sequence; identical to SEQ ID NO: 6550
  Synthetic polynucleotide

SEQ ID NO: 6552 - DNA, 180 bp, Artificial Sequence
  Synthetic polynucleotide
atcatctcaccttgcctcctgaaaggtcgcaacgtgtccctgcaggttaattaatatagattaattaatattcgttaattaatatgacttaattaatatctattaattaatatactttaattaatattgcttaattaatatgtattaattaatatggcgcgccatgcttcatcagactct

SEQ ID NO: 6553 - DNA, 180 bp, Artificial Sequence; identical to SEQ ID NO: 6552
  Synthetic polynucleotide

SEQ ID NO: 6554 - DNA, 197 bp, Artificial Sequence
  Synthetic polynucleotide
atcatctcaccttgcctcctgtcccttcggtattgcatcctgcaggaacatgcccgggcatgtcagaaacatgcccgggcatgtctcgaacatgcccgggcatgtcgacaacatgcccgggcatgtcctaaacatgcccgggcatgtcactaacatgcccgggcatgtctgcggcgcgccatgcttcatcagactct

SEQ ID NO: 6555 - DNA, 197 bp, Artificial Sequence; identical to SEQ ID NO: 6554
  Synthetic polynucleotide

SEQ ID NO: 6556 - DNA, 179 bp, Artificial Sequence
  Synthetic polynucleotide
atcatctcaccttgcctcctgagcgttactgcaggagtcctgcaggaatttcacacctaggtgtgactagagaaatttcacacctaggtgtgactagtcgaatttcacacctaggtgtgactaggacaatttcacacctaggtgtgactagctaggcgcgccatgcttcatcagactct

SEQ ID NO: 6557 - DNA, 179 bp, Artificial Sequence; identical to SEQ ID NO: 6556
  Synthetic polynucleotide

SEQ ID NO: 6558 - DNA, 191 bp, Artificial Sequence
  Synthetic polynucleotide
atcatctcaccttgcctcctggtgcttaagcatactgacctgcaggtgacctctcggtgacctagatgacctctcggtgaccttcgtgacctctcggtgacctgactgacctctcggtgacctctatgacctctcggtgacctacttgacctctcggtgaccttgcggcgcgccatgcttcatcagactct

SEQ ID NO: 6559 - DNA, 191 bp, Artificial Sequence; identical to SEQ ID NO: 6558
  Synthetic polynucleotide

SEQ ID NO: 6560 - DNA, 172 bp, Artificial Sequence
  Synthetic polynucleotide
atcatctcaccttgcctcctgctgattctgagaccgcgcctgcaggatgctaattaagaatgctaattatcgatgctaattagacatgctaattactaatgctaattaactatgctaattatgcatgctaattagtaatgctaattaggcgcgccatgcttcatcagactct

SEQ ID NO: 6561 - DNA, 172 bp, Artificial Sequence; identical to SEQ ID NO: 6560
  Synthetic polynucleotide

SEQ ID NO: 6562 - DNA, 196 bp, Artificial Sequence
  Synthetic polynucleotide
atcatctcaccttgcctcctgtttgtattgcattgccccctgcaggatatagaacattcagaatatagaacattctcgatatagaacattcgacatatagaacattcctaatatagaacattcactatatagaacattctgcatatagaacattcgtaatatagaacattcggcgcgccatgcttcatcagactct

SEQ ID NO: 6563 - DNA, 196 bp, Artificial Sequence; identical to SEQ ID NO: 6562
  Synthetic polynucleotide

SEQ ID NO: 6564 - DNA, 186 bp, Artificial Sequence
  Synthetic polynucleotide
atcatctcaccttgcctcctgccaacgccgaagtggatcctgcaggccccccccccgcccccgcacagaccccccccccgcccccgcactcgccccccccccgcccccgcacgacccccccccccgcccccgcacctaccccccccccgcccccgcacactggcgcgccatgcttcatcagactct

SEQ ID NO: 6565 - DNA, 186 bp, Artificial Sequence; identical to SEQ ID NO: 6564
  Synthetic polynucleotide

SEQ ID NO: 6566 - DNA, 191 bp, Artificial Sequence
  Synthetic polynucleotide
atcatctcaccttgcctcctgtctgatacttgtgttagcctgcagggcaacctcattatcgtcagagcaacctcattatcgtctcggcaacctcattatcgtcgacgcaacctcattatcgtcctagcaacctcattatcgtcactgcaacctcattatcgtctgcggcgcgccatgcttcatcagactct

SEQ ID NO: 6567 - DNA, 191 bp, Artificial Sequence; identical to SEQ ID NO: 6566
  Synthetic polynucleotide

SEQ ID NO: 6568 - DNA, 191 bp, Artificial Sequence
  Synthetic polynucleotide
atcatctcaccttgcctcctgtgaggtattcgttctttcctgcaggggaggaggagggggaggaggaagaggaggaggagggggaggaggatcgggaggaggagggggaggaggagacggaggaggagggggaggaggactaggaggaggagggggaggaggaactggcgcgccatgcttcatcagactct

SEQ ID NO: 6569 - DNA, 191 bp, Artificial Sequence; identical to SEQ ID NO: 6568
  Synthetic polynucleotide

SEQ ID NO: 6570 - DNA, 172 bp, Artificial Sequence
  Synthetic polynucleotide
atcatctcaccttgcctcctgcccgtcgtagagtgttacctgcaggctgagtcaccagactgagtcacctcgctgagtcaccgacctgagtcaccctactgagtcaccactctgagtcacctgcctgagtcaccgtactgagtcaccggcgcgccatgcttcatcagactct

SEQ ID NO: 6571 - DNA, 172 bp, Artificial Sequence; identical to SEQ ID NO: 6570
  Synthetic polynucleotide

SEQ ID NO: 6572 - DNA, 180 bp, Artificial Sequence
  Synthetic polynucleotide
atcatctcaccttgcctcctggggcgttcgataataaacctgcagggggggcggggtagagggggcggggttcggggggcggggtgacgggggcggggtctagggggcggggtactgggggcggggttgcgggggcggggtgtagggggcggggtggcgcgccatgcttcatcagactct

SEQ ID NO: 6573 - DNA, 180 bp, Artificial Sequence; identical to SEQ ID NO: 6572
  Synthetic polynucleotide

SEQ ID NO: 6574 - DNA, 197 bp, Artificial Sequence
  Synthetic polynucleotide
atcatctcaccttgcctcctgtgtcacctcatctaacacctgcaggcatgtctgggcatgtagacatgtctgggcatgttcgcatgtctgggcatgtgaccatgtctgggcatgtctacatgtctgggcatgtactcatgtctgggcatgttgccatgtctgggcatgtgtaggcgcgccatgcttcatcagactct

SEQ ID NO: 6575 - DNA, 197 bp, Artificial Sequence; identical to SEQ ID NO: 6574
  Synthetic polynucleotide

SEQ ID NO: 6576 - DNA, 190 bp, Artificial Sequence
  Synthetic polynucleotide
atcatctcaccttgcctcctgacacttcggcagatcgccctgcaggcgtcgtgggtggtcagacgtcgtgggtggtctcgcgtcgtgggtggtcgaccgtcgtgggtggtcctacgtcgtgggtggtcactcgtcgtgggtggtctgccgtcgtgggtggtcgtaggcgcgccatgcttcatcagactct

SEQ ID NO: 6577 - DNA, 190 bp, Artificial Sequence; identical to SEQ ID NO: 6576
  Synthetic polynucleotide

SEQ ID NO: 6578 - DNA, 164 bp, Artificial Sequence
  Synthetic polynucleotide
atcatctcaccttgcctcctgtaagagacatccagaaacctgcaggctgtttcagagactgtttcagtcgctgtttcaggacctgtttcagctactgtttcagactctgtttcagtgcctgtttcaggtactgtttcagggcgcgccatgcttcatcagactct

SEQ ID NO: 6579 - DNA, 164 bp, Artificial Sequence; identical to SEQ ID NO: 6578
  Synthetic polynucleotide

SEQ ID NO: 6580 - DNA, 196 bp, Artificial Sequence
  Synthetic polynucleotide
atcatctcaccttgcctcctgagcgcccaagaatgtctcctgcaggtgcaacaggtggtagatgcaacaggtggttcgtgcaacaggtggtgactgcaacaggtggtctatgcaacaggtggtacttgcaacaggtggttgctgcaacaggtggtgtatgcaacaggtggtggcgcgccatgcttcatcagactct

SEQ ID NO: 6581 - DNA, 196 bp, Artificial Sequence; identical to SEQ ID NO: 6580
  Synthetic polynucleotide

SEQ ID NO: 6582 - DNA, 191 bp, Artificial Sequence
  Synthetic polynucleotide
atcatctcaccttgcctcctgccacttgagcgcaaccacctgcagggtccactaattagttctagagtccactaattagttcttcggtccactaattagttctgacgtccactaattagttctctagtccactaattagttctactgtccactaattagttcttgcggcgcgccatgcttcatcagactct

SEQ ID NO: 6583 - DNA, 191 bp, Artificial Sequence; identical to SEQ ID NO: 6582
  Synthetic polynucleotide

SEQ ID NO: 6584 - DNA, 180 bp, Artificial Sequence
  Synthetic polynucleotide
atcatctcaccttgcctcctgagtctcacaagtgctatcctgcagggggggcggggcagagggggcggggctcggggggcggggcgacgggggcggggcctagggggcggggcactgggggcggggctgcgggggcggggcgtagggggcggggcggcgcgccatgcttcatcagactct

SEQ ID NO: 6585 - DNA, 180 bp, Artificial Sequence; identical to SEQ ID NO: 6584
  Synthetic polynucleotide

SEQ ID NO: 6586 - DNA, 197 bp, Artificial Sequence
  Synthetic polynucleotide
atcatctcaccttgcctcctgatacctgtttgttgctccctgcaggctggccacgaggcttagactggccacgaggctttcgctggccacgaggcttgacctggccacgaggcttctactggccacgaggcttactctggccacgaggctttgcctggccacgaggcttgtaggcgcgccatgcttcatcagactct

SEQ ID NO: 6587 - DNA, 197 bp, Artificial Sequence; identical to SEQ ID NO: 6586
  Synthetic polynucleotide

SEQ ID NO: 6588 - DNA, 197 bp, Artificial Sequence
  Synthetic polynucleotide
atcatctcaccttgcctcctgggatttggtatatgcctcctgcaggtgaccccgccaacaaagatgaccccgccaacaatcgtgaccccgccaacaagactgaccccgccaacaactatgaccccgccaacaaacttgaccccgccaacaatgctgaccccgccaacaagtaggcgcgccatgcttcatcagactct

SEQ ID NO: 6589 - DNA, 197 bp, Artificial Sequence; identical to SEQ ID NO: 6588
  Synthetic polynucleotide

SEQ ID NO: 6590 - DNA, 185 bp, Artificial Sequence
  Synthetic polynucleotide
atcatctcaccttgcctcctgcagatcatgttactcgtcctgcaggaaattattgttcttaaagaaaattattgttcttaatcgaaattattgttcttaagacaaattattgttcttaactaaaattattgttcttaaactaaattattgttcttaatgcggcgcgccatgcttcatcagactct

SEQ ID NO: 6591 - DNA, 185 bp, Artificial Sequence; identical to SEQ ID NO: 6590
  Synthetic polynucleotide

SEQ ID NO: 6592 - DNA, 148 bp, Artificial Sequence
  Synthetic polynucleotide
atcatctcaccttgcctcctgaaatgtgccgacagggacctgcagggtattttagagtatttttcggtattttgacgtattttctagtattttactgtatttttgcgtattttgtagtattttggcgcgccatgcttcatcagactct

SEQ ID NO: 6593 - DNA, 148 bp, Artificial Sequence; identical to SEQ ID NO: 6592
  Synthetic polynucleotide

SEQ ID NO: 6594 - DNA, 180 bp, Artificial Sequence
  Synthetic polynucleotide
atcatctcaccttgcctcctgatgacattcgatgtacgcctgcaggtattgtttattagatattgtttatttcgtattgtttattgactattgtttattctatattgtttattacttattgtttatttgctattgtttattgtatattgtttattggcgcgccatgcttcatcagactct

SEQ ID NO: 6595 - DNA, 180 bp, Artificial Sequence; identical to SEQ ID NO: 6594
  Synthetic polynucleotide

SEQ ID NO: 6596 - DNA, 190 bp, Artificial Sequence
  Synthetic polynucleotide
atcatctcaccttgcctcctgacttacgcgccgaccttcctgcagggttaattattaaccagagttaattattaacctcggttaattattaaccgacgttaattattaaccctagttaattattaaccactgttaattattaacctgcgttaattattaaccgtaggcgcgccatgcttcatcagactct

SEQ ID NO: 6597 - DNA, 190 bp, Artificial Sequence; identical to SEQ ID NO: 6596
  Synthetic polynucleotide

SEQ ID NO: 6598 - DNA, 180 bp, Artificial Sequence
  Synthetic polynucleotide
atcatctcaccttgcctcctgtgttgctgtacgcgtaacctgcaggcttctgggaaaagacttctgggaaatcgcttctgggaaagaccttctgggaaactacttctgggaaaactcttctgggaaatgccttctgggaaagtacttctgggaaaggcgcgccatgcttcatcagactct

SEQ ID NO: 6599 - DNA, 180 bp, Artificial Sequence; identical to SEQ ID NO: 6598
  Synthetic polynucleotide

SEQ ID NO: 6600 - DNA, 172 bp, Artificial Sequence
  Synthetic polynucleotide
atcatctcaccttgcctcctggaccaactatcgactaccctgcaggcttatctctaagacttatctctatcgcttatctctagaccttatctctactacttatctctaactcttatctctatgccttatctctagtacttatctctaggcgcgccatgcttcatcagactct

SEQ ID NO: 6601 - DNA, 172 bp, Artificial Sequence; identical to SEQ ID NO: 6600
  Synthetic polynucleotide

SEQ ID NO: 6602 - DNA, 188 bp, Artificial Sequence
  Synthetic polynucleotide
atcatctcaccttgcctcctgatatcagaggagcccagcctgcaggaccctcgaacccagaaccctcgaaccctcgaccctcgaacccgacaccctcgaacccctaaccctcgaacccactaccctcgaaccctgcaccctcgaacccgtaaccctcgaacccggcgcgccatgcttcatcagactct

SEQ ID NO: 6603 - DNA, 188 bp, Artificial Sequence; identical to SEQ ID NO: 6602
  Synthetic polynucleotide

SEQ ID NO: 6604 - DNA, 197 bp, Artificial Sequence
  Synthetic polynucleotide
atcatctcaccttgcctcctgcgataaatcgtatttcccctgcaggtcttggcaagaagccaaaagatcttggcaagaagccaaatcgtcttggcaagaagccaaagactcttggcaagaagccaaactatcttggcaagaagccaaaacttcttggcaagaagccaaatgcggcgcgccatgcttcatcagactct

SEQ ID NO: 6605 - DNA, 197 bp, Artificial Sequence; identical to SEQ ID NO: 6604
  Synthetic polynucleotide

SEQ ID NO: 6606 - DNA, 172 bp, Artificial Sequence
  Synthetic polynucleotide
atcatctcaccttgcctcctgactgctagaacctacatcctgcaggacttcctgttagaacttcctgtttcgacttcctgttgacacttcctgttctaacttcctgttactacttcctgtttgcacttcctgttgtaacttcctgttggcgcgccatgcttcatcagactct

SEQ ID NO: 6607 - DNA, 172 bp, Artificial Sequence; identical to SEQ ID NO: 6606
  Synthetic polynucleotide

SEQ ID NO: 6608 - DNA, 196 bp, Artificial Sequence
  Synthetic polynucleotide
atcatctcaccttgcctcctggcaacttaaccgcctaacctgcaggtgaataacattcaagatgaataacattcatcgtgaataacattcagactgaataacattcactatgaataacattcaacttgaataacattcatgctgaataacattcagtatgaataacattcaggcgcgccatgcttcatcagactct

SEQ ID NO: 6609 - DNA, 196 bp, Artificial Sequence; identical to SEQ ID NO: 6608
  Synthetic polynucleotide

SEQ ID NO: 6610 - DNA, 164 bp, Artificial Sequence
  Synthetic polynucleotide
atcatctcaccttgcctcctgtctatagcgttatcagccctgcagggtgacgtaaagagtgacgtaatcggtgacgtaagacgtgacgtaactagtgacgtaaactgtgacgtaatgcgtgacgtaagtagtgacgtaaggcgcgccatgcttcatcagactct

SEQ ID NO: 6611 - DNA, 164 bp, Artificial Sequence; identical to SEQ ID NO: 6610
  Synthetic polynucleotide

SEQ ID NO: 6612 - DNA, 164 bp, Artificial Sequence
  Synthetic polynucleotide
atcatctcaccttgcctcctgttgcatctcctggctgtcctgcaggtaacgcgatagataacgcgattcgtaacgcgatgactaacgcgatctataacgcgatacttaacgcgattgctaacgcgatgtataacgcgatggcgcgccatgcttcatcagactct

SEQ ID NO: 6613 - DNA, 164 bp, Artificial Sequence; identical to SEQ ID NO: 6612
  Synthetic polynucleotide

SEQ ID NO: 6614 - DNA, 190 bp, Artificial Sequence
  Synthetic polynucleotide
atcatctcaccttgcctcctgggcgaattgaagggacacctgcaggtaattagctaattaagataattagctaattatcgtaattagctaattagactaattagctaattactataattagctaattaacttaattagctaattatgctaattagctaattagtaggcgcgccatgcttcatcagactct

SEQ ID NO: 6615 - DNA, 190 bp, Artificial Sequence; identical to SEQ ID NO: 6614
  Synthetic polynucleotide

SEQ ID NO: 6616 - DNA, 185 bp, Artificial Sequence
  Synthetic polynucleotide
atcatctcaccttgcctcctgcgatggtttaaagtgggcctgcagggagttcatcgggttcaagagagttcatcgggttcatcggagttcatcgggttcagacgagttcatcgggttcactagagttcatcgggttcaactgagttcatcgggttcatgcggcgcgccatgcttcatcagactct

SEQ ID NO: 6617 - DNA, 185 bp, Artificial Sequence; identical to SEQ ID NO: 6616
  Synthetic polynucleotide

SEQ ID NO: 6618 - DNA, 191 bp, Artificial Sequence
  Synthetic polynucleotide
atcatctcaccttgcctcctgcctaactaggtctatcccctgcaggaaacactgcaattgtttagaaaacactgcaattgttttcgaaacactgcaattgtttgacaaacactgcaattgtttctaaaacactgcaattgtttactaaacactgcaattgttttgcggcgcgccatgcttcatcagactct

SEQ ID NO: 6619 - DNA, 191 bp, Artificial Sequence; identical to SEQ ID NO: 6618
  Synthetic polynucleotide

SEQ ID NO: 6620 - DNA, 172 bp, Artificial Sequence
  Synthetic polynucleotide
atcatctcaccttgcctcctggacacattgttatacagcctgcagggcgtaattagagagcgtaattagtcggcgtaattaggacgcgtaattagctagcgtaattagactgcgtaattagtgcgcgtaattaggtagcgtaattagggcgcgccatgcttcatcagactct

SEQ ID NO: 6621 - DNA, 172 bp, Artificial Sequence; identical to SEQ ID NO: 6620
  Synthetic polynucleotide

SEQ ID NO: 6622 - DNA, 186 bp, Artificial Sequence
  Synthetic polynucleotide
atcatctcaccttgcctcctgacagctatgcgcaccagcctgcaggtcacttttggctttcctttaagatcacttttggctttcctttatcgtcacttttggctttcctttagactcacttttggctttcctttactatcacttttggctttcctttaactggcgcgccatgcttcatcagactct

SEQ ID NO: 6623 - DNA, 186 bp, Artificial Sequence; identical to SEQ ID NO: 6622
  Synthetic polynucleotide

SEQ ID NO: 6624 - DNA, 200 bp, Artificial Sequence
  Synthetic polynucleotide
atcatctcaccttgcctcctgccttcaatctaagaacgcctgcagggcgctgtccgtggtgctgaagagcgctgtccgtggtgctgatcggcgctgtccgtggtgctgagacgcgctgtccgtggtgctgactagcgctgtccgtggtgctgaactgcgctgtccgtggtgctgaggcgcgccatgcttcatcagactct

SEQ ID NO: 6625 - DNA, 200 bp, Artificial Sequence; identical to SEQ ID NO: 6624
  Synthetic polynucleotide

SEQ ID NO: 6626 - DNA, 188 bp, Artificial Sequence
  Synthetic polynucleotide
atcatctcaccttgcctcctgatgatcattcccgcacgcctgcaggacgcccacgcatagaacgcccacgcattcgacgcccacgcatgacacgcccacgcatctaacgcccacgcatactacgcccacgcattgcacgcccacgcatgtaacgcccacgcatggcgcgccatgcttcatcagactct

SEQ ID NO: 6627 - DNA, 188 bp, Artificial Sequence; identical to SEQ ID NO: 6626
  Synthetic polynucleotide

SEQ ID NO: 6628 - DNA, 197 bp, Artificial Sequence
  Synthetic polynucleotide
atcatctcaccttgcctcctgatccggcttgacaacggcctgcaggatagcgccccctggtggcagaatagcgccccctggtggctcgatagcgccccctggtggcgacatagcgccccctggtggcctaatagcgccccctggtggcactatagcgccccctggtggctgcggcgcgccatgcttcatcagactct

SEQ ID NO: 6629 - DNA, 197 bp, Artificial Sequence; identical to SEQ ID NO: 6628
  Synthetic polynucleotide

SEQ ID NO: 6630 - DNA, 191 bp, Artificial Sequence
  Synthetic polynucleotide
atcatctcaccttgcctcctgtctacgcaagactccaccctgcagggatgttaactagttttcagagatgttaactagttttctcggatgttaactagttttcgacgatgttaactagttttcctagatgttaactagttttcactgatgttaactagttttctgcggcgcgccatgcttcatcagactct

SEQ ID NO: 6631 - DNA, 191 bp, Artificial Sequence; identical to SEQ ID NO: 6630
  Synthetic polynucleotide

SEQ ID NO: 6632 - DNA, 183 bp, Artificial Sequence
  Synthetic polynucleotide
atcatctcaccttgcctcctgggaggcctcttcgttaccctgcaggggttattaattggttatattggttaagaggttattaattggttatattggttatcgggttattaattggttatattggttagacggttattaattggttatattggttactaggcgcgccatgcttcatcagactct

SEQ ID NO: 6633 - DNA, 183 bp, Artificial Sequence; identical to SEQ ID NO: 6632
  Synthetic polynucleotide

SEQ ID NO: 6634 - DNA, 190 bp, Artificial Sequence
  Synthetic polynucleotide
atcatctcaccttgcctcctggcgtggcacaagatctgcctgcaggctgaggtaattaatagactgaggtaattaattcgctgaggtaattaatgacctgaggtaattaatctactgaggtaattaatactctgaggtaattaattgcctgaggtaattaatgtaggcgcgccatgcttcatcagactct

SEQ ID NO: 6635 - DNA, 190 bp, Artificial Sequence; identical to SEQ ID NO: 6634
  Synthetic polynucleotide

SEQ ID NO: 6636 - DNA, 164 bp, Artificial Sequence
  Synthetic polynucleotide
atcatctcaccttgcctcctgagggtaccagcttattacctgcagggttgctatgagagttgctatgtcggttgctatggacgttgctatgctagttgctatgactgttgctatgtgcgttgctatggtagttgctatgggcgcgccatgcttcatcagactct

SEQ ID NO: 6637 - DNA, 164 bp, Artificial Sequence; identical to SEQ ID NO: 6636
  Synthetic polynucleotide

SEQ ID NO: 6638 - DNA, 148 bp, Artificial Sequence
  Synthetic polynucleotide
atcatctcaccttgcctcctgtttataggtccttctgacctgcaggtttgacaagatttgacatcgtttgacagactttgacactatttgacaacttttgacatgctttgacagtatttgacaggcgcgccatgcttcatcagactct

SEQ ID NO: 6639 - DNA, 148 bp, Artificial Sequence; identical to SEQ ID NO: 6638
  Synthetic polynucleotide

SEQ ID NO: 6640 - DNA, 196 bp, Artificial Sequence
  Synthetic polynucleotide
atcatctcaccttgcctcctgacaggcatcattgtgcacctgcaggtaatttccggtggagataatttccggtggtcgtaatttccggtgggactaatttccggtggctataatttccggtggacttaatttccggtggtgctaatttccggtgggtataatttccggtggggcgcgccatgcttcatcagactct

SEQ ID NO: 6641 - DNA, 196 bp, Artificial Sequence; identical to SEQ ID NO: 6640
  Synthetic polynucleotide

SEQ ID NO: 6642 - DNA, 188 bp, Artificial Sequence
  Synthetic polynucleotide
atcatctcaccttgcctcctggaccaacctgtttggcacctgcaggaaatttgctgacagaaaatttgctgactcgaaatttgctgacgacaaatttgctgacctaaaatttgctgacactaaatttgctgactgcaaatttgctgacgtaaaatttgctgacggcgcgccatgcttcatcagactct

SEQ ID NO: 6643 - DNA, 188 bp, Artificial Sequence; identical to SEQ ID NO: 6642
  Synthetic polynucleotide

SEQ ID NO: 6644 - DNA, 172 bp, Artificial Sequence
  Synthetic polynucleotide
atcatctcaccttgcctcctggatttaaccggctggcacctgcaggtgcgtgggcgagatgcgtgggcgtcgtgcgtgggcggactgcgtgggcgctatgcgtgggcgacttgcgtgggcgtgctgcgtgggcggtatgcgtgggcgggcgcgccatgcttcatcagactct

SEQ ID NO: 6645 - DNA, 172 bp, Artificial Sequence; identical to SEQ ID NO: 6644
  Synthetic polynucleotide

SEQ ID NO: 6646 - DNA, 183 bp, Artificial Sequence
  Synthetic polynucleotide
atcatctcaccttgcctcctgattagcatgagactgcccctgcaggacatagtgacacctaggtgtgaaatagaacatagtgacacctaggtgtgaaattcgacatagtgacacctaggtgtgaaatgacacatagtgacacctaggtgtgaaatctaggcgcgccatgcttcatcagactct

SEQ ID NO: 6647 - DNA, 183 bp, Artificial Sequence; identical to SEQ ID NO: 6646
  Synthetic polynucleotide

SEQ ID NO: 6648 - DNA, 196 bp, Artificial Sequence
  Synthetic polynucleotide
atcatctcaccttgcctcctgggtacttaggtgtggtgcctgcaggaatccagatgttgagaaatccagatgttgtcgaatccagatgttggacaatccagatgttgctaaatccagatgttgactaatccagatgttgtgcaatccagatgttggtaaatccagatgttgggcgcgccatgcttcatcagactct

SEQ ID NO: 6649 - DNA, 196 bp, Artificial Sequence; identical to SEQ ID NO: 6648
  Synthetic polynucleotide

SEQ ID NO: 6650 - DNA, 196 bp, Artificial Sequence
  Synthetic polynucleotide
atcatctcaccttgcctcctgtacatggaaaccggcaccctgcaggggcctgggggcggagaggcctgggggcggtcgggcctgggggcgggacggcctgggggcggctaggcctgggggcggactggcctgggggcggtgcggcctgggggcgggtaggcctgggggcggggcgcgccatgcttcatcagactct

SEQ ID NO: 6651 - DNA, 196 bp, Artificial Sequence; identical to SEQ ID NO: 6650
  Synthetic polynucleotide

SEQ ID NO: 6652 - DNA, 191 bp, Artificial Sequence
  Synthetic polynucleotide
atcatctcaccttgcctcctgacgtaaccgttgaggcccctgcaggagctgttaactagccgtagaagctgttaactagccgttcgagctgttaactagccgtgacagctgttaactagccgtctaagctgttaactagccgtactagctgttaactagccgttgcggcgcgccatgcttcatcagactct

SEQ ID NO: 6653 - DNA, 191 bp, Artificial Sequence; identical to SEQ ID NO: 6652
  Synthetic polynucleotide

SEQ ID NO: 6654 - DNA, 190 bp, Artificial Sequence
  Synthetic polynucleotide
atcatctcaccttgcctcctgacagtctgagcaggattcctgcaggtgaatagtcattcaagatgaatagtcattcatcgtgaatagtcattcagactgaatagtcattcactatgaatagtcattcaacttgaatagtcattcatgctgaatagtcattcagtaggcgcgccatgcttcatcagactct

SEQ ID NO: 6655 - DNA, 190 bp, Artificial Sequence; identical to SEQ ID NO: 6654
  Synthetic polynucleotide

SEQ ID NO: 6656 - DNA, 180 bp, Artificial Sequence
  Synthetic polynucleotide
atcatctcaccttgcctcctgccatgacatatgagttccctgcaggagaccccccacagaagaccccccactcgagaccccccacgacagaccccccacctaagaccccccacactagaccccccactgcagaccccccacgtaagaccccccacggcgcgccatgcttcatcagactct

SEQ ID NO: 6657 - DNA, 180 bp, Artificial Sequence; identical to SEQ ID NO: 6656
  Synthetic polynucleotide

SEQ ID NO: 6658 - DNA, 191 bp, Artificial Sequence
  Synthetic polynucleotide
atcatctcaccttgcctcctgcaacggcacagttatgccctgcagggggaacacaatgttcccagagggaacacaatgttccctcggggaacacaatgttcccgacgggaacacaatgttcccctagggaacacaatgttcccactgggaacacaatgttccctgcggcgcgccatgcttcatcagactct

SEQ ID NO: 6659 - DNA, 191 bp, Artificial Sequence; identical to SEQ ID NO: 6658
  Synthetic polynucleotide

SEQ ID NO: 6660 - DNA, 164 bp, Artificial Sequence
  Synthetic polynucleotide
atcatctcaccttgcctcctgctgtgatagtacaaccgcctgcaggtgcacgtgcagatgcacgtgctcgtgcacgtgcgactgcacgtgcctatgcacgtgcacttgcacgtgctgctgcacgtgcgtatgcacgtgcggcgcgccatgcttcatcagactct

SEQ ID NO: 6661 - DNA, 164 bp, Artificial Sequence; identical to SEQ ID NO: 6660
  Synthetic polynucleotide

SEQ ID NO: 6662 - DNA, 185 bp, Artificial Sequence
  Synthetic polynucleotide
atcatctcaccttgcctcctgtgcttcatccttgaggccctgcaggggggtaattagctctgagaggggtaattagctctgtcgggggtaattagctctggacggggtaattagctctgctaggggtaattagctctgactggggtaattagctctgtgcggcgcgccatgcttcatcagactct

SEQ ID NO: 6663 - DNA, 185 bp, Artificial Sequence; identical to SEQ ID NO: 6662
  Synthetic polynucleotide

SEQ ID NO: 6664 - DNA, 197 bp, Artificial Sequence
  Synthetic polynucleotide
atcatctcaccttgcctcctgcttagttattagcactgcctgcaggaaattgctgactcagagaaaattgctgactcagtcgaaattgctgactcaggacaaattgctgactcagctaaaattgctgactcagactaaattgctgactcagtgcaaattgctgactcaggtaggcgcgccatgcttcatcagactct

SEQ ID NO: 6665 - DNA, 197 bp, Artificial Sequence; identical to SEQ ID NO: 6664
  Synthetic polynucleotide

SEQ ID NO: 6666 - DNA, 186 bp, Artificial Sequence
  Synthetic polynucleotide
atcatctcaccttgcctcctgatctagaccgctggcagcctgcaggtccttatctgcccccaccagagatccttatctgcccccaccagtcgtccttatctgcccccaccaggactccttatctgcccccaccagctatccttatctgcccccaccagactggcgcgccatgcttcatcagactct

SEQ ID NO: 6667 - DNA, 186 bp, Artificial Sequence; identical to SEQ ID NO: 6666
  Synthetic polynucleotide

SEQ ID NO: 6668 - DNA, 185 bp, Artificial Sequence
  Synthetic polynucleotide
atcatctcaccttgcctcctgacttgagagatccgcatcctgcaggaaattttattaccgttagaaaattttattaccgtttcgaaattttattaccgttgacaaattttattaccgttctaaaattttattaccgttactaaattttattaccgtttgcggcgcgccatgcttcatcagactct

SEQ ID NO: 6669 - DNA, 185 bp, Artificial Sequence; identical to SEQ ID NO: 6668
  Synthetic polynucleotide

SEQ ID NO: 6670 - DNA, 196 bp, Artificial Sequence
  Synthetic polynucleotide
atcatctcaccttgcctcctgatttgagaaggtgtttccctgcaggatatcaaggtcatagaatatcaaggtcattcgatatcaaggtcatgacatatcaaggtcatctaatatcaaggtcatactatatcaaggtcattgcatatcaaggtcatgtaatatcaaggtcatggcgcgccatgcttcatcagactct

SEQ ID NO: 6671 - DNA, 196 bp, Artificial Sequence; identical to SEQ ID NO: 6670
  Synthetic polynucleotide

SEQ ID NO: 6672 - DNA, 190 bp, Artificial Sequence
  Synthetic polynucleotide
atcatctcaccttgcctcctggaaaggagatggagcgtcctgcaggagccttggggagggagaagccttggggagggtcgagccttggggaggggacagccttggggagggctaagccttggggagggactagccttggggagggtgcagccttggggaggggtaggcgcgccatgcttcatcagactct

SEQ ID NO: 6673 - DNA, 190 bp, Artificial Sequence; identical to SEQ ID NO: 6672
  Synthetic polynucleotide

SEQ ID NO: 6674 - DNA, 156 bp, Artificial Sequence
  Synthetic polynucleotide
atcatctcaccttgcctcctgctgtcctacttcccaaacctgcaggttaattatagattaattattcgttaattatgacttaattatctattaattatactttaattattgcttaattatgtattaattatggcgcgccatgcttcatcagactct

SEQ ID NO: 6675 - DNA, 156 bp, Artificial Sequence; identical to SEQ ID NO: 6674
  Synthetic polynucleotide

SEQ ID NO: 6676 - DNA, 156 bp, Artificial Sequence
  Synthetic polynucleotide
atcatctcaccttgcctcctgacatacggtcctgggagcctgcaggcgccccttagacgcccctttcgcgccccttgaccgccccttctacgccccttactcgcccctttgccgccccttgtacgccccttggcgcgccatgcttcatcagactct

SEQ ID NO: 6677 - DNA, 156 bp, Artificial Sequence; identical to SEQ ID NO: 6676
  Synthetic polynucleotide

SEQ ID NO: 6678 - DNA, 156 bp, Artificial Sequence
  Synthetic polynucleotide
atcatctcaccttgcctcctgtcatacttaatggccgtcctgcaggaccggaagagaaccggaagtcgaccggaaggacaccggaagctaaccggaagactaccggaagtgcaccggaaggtaaccggaagggcgcgccatgcttcatcagactct

SEQ ID NO: 6679 - DNA, 156 bp, Artificial Sequence; identical to SEQ ID NO: 6678
  Synthetic polynucleotide

SEQ ID NO: 6680 - DNA, 164 bp, Artificial Sequence
  Synthetic polynucleotide
atcatctcaccttgcctcctgttctaaaccatgcgttccctgcaggatgacgcaaagaatgacgcaatcgatgacgcaagacatgacgcaactaatgacgcaaactatgacgcaatgcatgacgcaagtaatgacgcaaggcgcgccatgcttcatcagactct

SEQ ID NO: 6681 - DNA, 164 bp, Artificial Sequence; identical to SEQ ID NO: 6680
  Synthetic polynucleotide

SEQ ID NO: 6682 - DNA, 180 bp, Artificial Sequence
  Synthetic polynucleotide
atcatctcaccttgcctcctgttacctcataggtataccctgcaggggtgactcagaagaggtgactcagatcgggtgactcagagacggtgactcagactaggtgactcagaactggtgactcagatgcggtgactcagagtaggtgactcagaggcgcgccatgcttcatcagactct

SEQ ID NO: 6683 - DNA, 180 bp, Artificial Sequence; identical to SEQ ID NO: 6682
  Synthetic polynucleotide

SEQ ID NO: 6684 - DNA, 156 bp, Artificial Sequence
  Synthetic polynucleotide
atcatctcaccttgcctcctgatcggtgacctgatggccctgcaggtgttattgagatgttattgtcgtgttattggactgttattgctatgttattgacttgttattgtgctgttattggtatgttattgggcgcgccatgcttcatcagactct

SEQ ID NO: 6685 - DNA, 156 bp, Artificial Sequence; identical to SEQ ID NO: 6684
  Synthetic polynucleotide

SEQ ID NO: 6686 - DNA, 180 bp, Artificial Sequence
  Synthetic polynucleotide
atcatctcaccttgcctcctgcaggaagggcttcacagcctgcaggtgacctttaaaagatgacctttaaatcgtgacctttaaagactgacctttaaactatgacctttaaaacttgacctttaaatgctgacctttaaagtatgacctttaaaggcgcgccatgcttcatcagactct

SEQ ID NO: 6687 - DNA, 180 bp, Artificial Sequence; identical to SEQ ID NO: 6686
  Synthetic polynucleotide

SEQ ID NO: 6688 - DNA, 164 bp, Artificial Sequence
  Synthetic polynucleotide
atcatctcaccttgcctcctgttcccttcgggtaagtacctgcaggctaattagtagactaattagttcgctaattagtgacctaattagtctactaattagtactctaattagttgcctaattagtgtactaattagtggcgcgccatgcttcatcagactct

SEQ ID NO: 6689 - DNA, 164 bp, Artificial Sequence; identical to SEQ ID NO: 6688
  Synthetic polynucleotide

SEQ ID NO: 6690 - DNA, 172 bp, Artificial Sequence
  Synthetic polynucleotide
atcatctcaccttgcctcctgttgcgtcagctgtggagcctgcagggccttatctgagagccttatctgtcggccttatctggacgccttatctgctagccttatctgactgccttatctgtgcgccttatctggtagccttatctgggcgcgccatgcttcatcagactct

SEQ ID NO: 6691 - DNA, 172 bp, Artificial Sequence; identical to SEQ ID NO: 6690
  Synthetic polynucleotide

SEQ ID NO: 6692 - DNA, 188 bp, Artificial Sequence
  Synthetic polynucleotide
atcatctcaccttgcctcctggtcgaggtctttgatggcctgcagggattacgtaaccagagattacgtaacctcggattacgtaaccgacgattacgtaaccctagattacgtaaccactgattacgtaacctgcgattacgtaaccgtagattacgtaaccggcgcgccatgcttcatcagactct

SEQ ID NO: 6693 - DNA, 188 bp, Artificial Sequence; identical to SEQ ID NO: 6692
  Synthetic polynucleotide

SEQ ID NO: 6694 - DNA, 197 bp, Artificial Sequence
  Synthetic polynucleotide
atcatctcaccttgcctcctgaacagcgaagtgacatacctgcaggttcagcaccatggacagattcagcaccatggactcgttcagcaccatggacgacttcagcaccatggacctattcagcaccatggacactttcagcaccatggactgcttcagcaccatggacgtaggcgcgccatgcttcatcagactct

SEQ ID NO: 6695 - DNA, 197 bp, Artificial Sequence; identical to SEQ ID NO: 6694
  Synthetic polynucleotide

SEQ ID NO: 6696 - DNA, 190 bp, Artificial Sequence
  Synthetic polynucleotide
atcatctcaccttgcctcctgctgtgcatccgaagtcccctgcagggtaaacatgtttacagagtaaacatgtttactcggtaaacatgtttacgacgtaaacatgtttacctagtaaacatgtttacactgtaaacatgtttactgcgtaaacatgtttacgtaggcgcgccatgcttcatcagactct

SEQ ID NO: 6697 - DNA, 190 bp, Artificial Sequence; identical to SEQ ID NO: 6696
  Synthetic polynucleotide

SEQ ID NO: 6698 - DNA, 156 bp, Artificial Sequence
  Synthetic polynucleotide
atcatctcaccttgcctcctggtcttcaaggccatactcctgcaggttaattagagattaattagtcgttaattaggacttaattagctattaattagactttaattagtgcttaattaggtattaattagggcgcgccatgcttcatcagactct

SEQ ID NO: 6699 - DNA, 156 bp, Artificial Sequence; identical to SEQ ID NO: 6698
  Synthetic polynucleotide

SEQ ID NO: 6700 - DNA, 191 bp, Artificial Sequence
  Synthetic polynucleotide
atcatctcaccttgcctcctgcgtggacatctgaagttcctgcaggtagtcctttgttcttctagatagtcctttgttcttcttcgtagtcctttgttcttctgactagtcctttgttcttctctatagtcctttgttcttctacttagtcctttgttcttcttgcggcgcgccatgcttcatcagactct

SEQ ID NO: 6701 - DNA, 191 bp, Artificial Sequence; identical to SEQ ID NO: 6700
  Synthetic polynucleotide

SEQ ID NO: 6702 - DNA, 156 bp, Artificial Sequence
  Synthetic polynucleotide
atcatctcaccttgcctcctgcacggatgtcaagtgcgcctgcaggttaattaaagattaattaatcgttaattaagacttaattaactattaattaaactttaattaatgcttaattaagtattaattaaggcgcgccatgcttcatcagactct

SEQ ID NO: 6703 - DNA, 156 bp, Artificial Sequence; identical to SEQ ID NO: 6702
  Synthetic polynucleotide

SEQ ID NO: 6704 - DNA, 180 bp, Artificial Sequence
  Synthetic polynucleotide
atcatctcaccttgcctcctgcctgtcagaggttaacacctgcagggccacgtgaccagagccacgtgacctcggccacgtgaccgacgccacgtgaccctagccacgtgaccactgccacgtgacctgcgccacgtgaccgtagccacgtgaccggcgcgccatgcttcatcagactct

SEQ ID NO: 6705 - DNA, 180 bp, Artificial Sequence; identical to SEQ ID NO: 6704
  Synthetic polynucleotide

SEQ ID NO: 6706 - DNA, 191 bp, Artificial Sequence
  Synthetic polynucleotide
atcatctcaccttgcctcctggtcgttcgtcataagtacctgcaggaattaattaattaattcagaaattaattaattaattctcgaattaattaattaattcgacaattaattaattaattcctaaattaattaattaattcactaattaattaattaattctgcggcgcgccatgcttcatcagactct

SEQ ID NO: 6707 - DNA, 191 bp, Artificial Sequence; identical to SEQ ID NO: 6706
  Synthetic polynucleotide

SEQ ID NO: 6708 - DNA, 191 bp, Artificial Sequence
  Synthetic polynucleotide
atcatctcaccttgcctcctgcgacactgcagtacaggcctgcagggatagatcaaagggattagagatagatcaaagggatttcggatagatcaaagggattgacgatagatcaaagggattctagatagatcaaagggattactgatagatcaaagggatttgcggcgcgccatgcttcatcagactct

SEQ ID NO: 6709 - DNA, 191 bp, Artificial Sequence; identical to SEQ ID NO: 6708
  Synthetic polynucleotide

SEQ ID NO: 6710 - DNA, 156 bp, Artificial Sequence
  Synthetic polynucleotide
atcatctcaccttgcctcctgctagcttccagatggcacctgcaggttaattacagattaattactcgttaattacgacttaattacctattaattacactttaattactgcttaattacgtattaattacggcgcgccatgcttcatcagactct

SEQ ID NO: 6711 - DNA, 156 bp, Artificial Sequence; identical to SEQ ID NO: 6710
  Synthetic polynucleotide

SEQ ID NO: 6712 - DNA, 185 bp, Artificial Sequence
  Synthetic polynucleotide
atcatctcaccttgcctcctgccgaacgtacaaagtagcctgcaggaggtgtgaaggtgtgaagaaggtgtgaaggtgtgatcgaggtgtgaaggtgtgagacaggtgtgaaggtgtgactaaggtgtgaaggtgtgaactaggtgtgaaggtgtgatgcggcgcgccatgcttcatcagactct

SEQ ID NO: 6713 - DNA, 185 bp, Artificial Sequence; identical to SEQ ID NO: 6712
  Synthetic polynucleotide

SEQ ID NO: 6714 - DNA, 197 bp, Artificial Sequence
  Synthetic polynucleotide
atcatctcaccttgcctcctggggtagtgcttacgtaccctgcaggtggtgactcatcctcagatggtgactcatcctctcgtggtgactcatcctcgactggtgactcatcctcctatggtgactcatcctcacttggtgactcatcctctgctggtgactcatcctcgtaggcgcgccatgcttcatcagactct

SEQ ID NO: 6715 - DNA, 197 bp, Artificial Sequence; identical to SEQ ID NO: 6714
  Synthetic polynucleotide

SEQ ID NO: 6716 - DNA, 172 bp, Artificial Sequence
  Synthetic polynucleotide
atcatctcaccttgcctcctgtacaatgtggtagacgacctgcaggctacttcctgagactacttcctgtcgctacttcctggacctacttcctgctactacttcctgactctacttcctgtgcctacttcctggtactacttcctgggcgcgccatgcttcatcagactct

SEQ ID NO: 6717 - DNA, 172 bp, Artificial Sequence; identical to SEQ ID NO: 6716
  Synthetic polynucleotide

SEQ ID NO: 6718 - DNA, 180 bp, Artificial Sequence
  Synthetic polynucleotide
atcatctcaccttgcctcctgtctatgcgcgaaccaatcctgcaggcctttgatgttagacctttgatgtttcgcctttgatgttgaccctttgatgttctacctttgatgttactcctttgatgtttgccctttgatgttgtacctttgatgttggcgcgccatgcttcatcagactct

SEQ ID NO: 6719 - DNA, 180 bp, Artificial Sequence; identical to SEQ ID NO: 6718
  Synthetic polynucleotide

SEQ ID NO: 6720 - DNA, 172 bp, Artificial Sequence
  Synthetic polynucleotide
atcatctcaccttgcctcctgatgctttgttagaacaccctgcaggactcaagtgtagaactcaagtgttcgactcaagtgtgacactcaagtgtctaactcaagtgtactactcaagtgttgcactcaagtgtgtaactcaagtgtggcgcgccatgcttcatcagactct

SEQ ID NO: 6721 - DNA, 172 bp, Artificial Sequence; identical to SEQ ID NO: 6720
  Synthetic polynucleotide

SEQ ID NO: 6722 - DNA, 190 bp, Artificial Sequence
  Synthetic polynucleotide
atcatctcaccttgcctcctgcctcttcctcgagggaacctgcaggcatgcatatgcaaaagacatgcatatgcaaatcgcatgcatatgcaaagaccatgcatatgcaaactacatgcatatgcaaaactcatgcatatgcaaatgccatgcatatgcaaagtaggcgcgccatgcttcatcagactct

SEQ ID NO: 6723 - DNA, 190 bp, Artificial Sequence; identical to SEQ ID NO: 6722
  Synthetic polynucleotide

SEQ ID NO: 6724 - DNA, 196 bp, Artificial Sequence
  Synthetic polynucleotide
atcatctcaccttgcctcctgattaggtatgtagtgctcctgcaggtgcagctgtccctagatgcagctgtcccttcgtgcagctgtccctgactgcagctgtccctctatgcagctgtccctacttgcagctgtcccttgctgcagctgtccctgtatgcagctgtccctggcgcgccatgcttcatcagactct

SEQ ID NO: 6725 - DNA, 196 bp, Artificial Sequence; identical to SEQ ID NO: 6724
  Synthetic polynucleotide

SEQ ID NO: 6726 - DNA, 164 bp, Artificial Sequence
  Synthetic polynucleotide
atcatctcaccttgcctcctgtccagatgaatgcacgtcctgcaggtgacgtacaagatgacgtacatcgtgacgtacagactgacgtacactatgacgtacaacttgacgtacatgctgacgtacagtatgacgtacaggcgcgccatgcttcatcagactct

SEQ ID NO: 6727 - DNA, 164 bp, Artificial Sequence; identical to SEQ ID NO: 6726
  Synthetic polynucleotide

SEQ ID NO: 6728 - DNA, 164 bp, Artificial Sequence
  Synthetic polynucleotide
atcatctcaccttgcctcctgtgttggcgagtttcgatcctgcaggctaattagcagactaattagctcgctaattagcgacctaattagcctactaattagcactctaattagctgcctaattagcgtactaattagcggcgcgccatgcttcatcagactct

SEQ ID NO: 6729 - DNA, 164 bp, Artificial Sequence; identical to SEQ ID NO: 6728
  Synthetic polynucleotide

SEQ ID NO: 6730 - DNA, 190 bp, Artificial Sequence
  Synthetic polynucleotide
atcatctcaccttgcctcctgcacgatcgcacctcaaacctgcagggggcatcaatcaaaagagggcatcaatcaaatcggggcatcaatcaaagacgggcatcaatcaaactagggcatcaatcaaaactgggcatcaatcaaatgcgggcatcaatcaaagtaggcgcgccatgcttcatcagactct

SEQ ID NO: 6731 - DNA, 190 bp, Artificial Sequence; identical to SEQ ID NO: 6730
  Synthetic polynucleotide

SEQ ID NO: 6732 - DNA, 191 bp, Artificial Sequence
  Synthetic polynucleotide
atcatctcaccttgcctcctgctctgctgttgctttaacctgcaggataagtgataccctatcagaataagtgataccctatctcgataagtgataccctatcgacataagtgataccctatcctaataagtgataccctatcactataagtgataccctatctgcggcgcgccatgcttcatcagactct

SEQ ID NO: 6733 - DNA, 191 bp, Artificial Sequence; identical to SEQ ID NO: 6732
  Synthetic polynucleotide

SEQ ID NO: 6734 - DNA, 191 bp, Artificial Sequence
  Synthetic polynucleotide
atcatctcaccttgcctcctgacccaatcggctgtctacctgcagggaagaccaattagcgctagagaagaccaattagcgcttcggaagaccaattagcgctgacgaagaccaattagcgctctagaagaccaattagcgctactgaagaccaattagcgcttgcggcgcgccatgcttcatcagactct

SEQ ID NO: 6735 - DNA, 191 bp, Artificial Sequence; identical to SEQ ID NO: 6734
  Synthetic polynucleotide

SEQ ID NO: 6736 - DNA, 164 bp, Artificial Sequence
  Synthetic polynucleotide
atcatctcaccttgcctcctgcacgacatggaccagtacctgcaggtgacgtacgagatgacgtacgtcgtgacgtacggactgacgtacgctatgacgtacgacttgacgtacgtgctgacgtacggtatgacgtacgggcgcgccatgcttcatcagactct

SEQ ID NO: 6737 - DNA, 164 bp, Artificial Sequence; identical to SEQ ID NO: 6736
  Synthetic polynucleotide

SEQ ID NO: 6738 - DNA, 197 bp, Artificial Sequence
  Synthetic polynucleotide
atcatctcaccttgcctcctgcacttatggtcacagggcctgcagggtgatttgcatatttagagtgatttgcatattttcggtgatttgcatatttgacgtgatttgcatatttctagtgatttgcatatttactgtgatttgcatattttgcgtgatttgcatatttgtaggcgcgccatgcttcatcagactct

SEQ ID NO: 6739 - DNA, 197 bp, Artificial Sequence; identical to SEQ ID NO: 6738
  Synthetic polynucleotide

SEQ ID NO: 6740 - DNA, 172 bp, Artificial Sequence
  Synthetic polynucleotide
atcatctcaccttgcctcctgccaactccactatggaacctgcaggcacacacctgagacacacacctgtcgcacacacctggaccacacacctgctacacacacctgactcacacacctgtgccacacacctggtacacacacctgggcgcgccatgcttcatcagactct

SEQ ID NO: 6741 - DNA, 172 bp, Artificial Sequence; identical to SEQ ID NO: 6740
  Synthetic polynucleotide

SEQ ID NO: 6742 - DNA, 191 bp, Artificial Sequence
  Synthetic polynucleotide
atcatctcaccttgcctcctgtgtctacagcgcactttcctgcaggagtattacatgtattttagaagtattacatgtatttttcgagtattacatgtattttgacagtattacatgtattttctaagtattacatgtattttactagtattacatgtatttttgcggcgcgccatgcttcatcagactct

SEQ ID NO: 6743 - DNA, 191 bp, Artificial Sequence; identical to SEQ ID NO: 6742
  Synthetic polynucleotide

SEQ ID NO: 6744 - DNA, 164 bp, Artificial Sequence
  Synthetic polynucleotide
atcatctcaccttgcctcctgaatcgtcggactcgcaccctgcaggtttttccggagatttttccggtcgtttttccgggactttttccggctatttttccggacttttttccggtgctttttccgggtatttttccggggcgcgccatgcttcatcagactct

SEQ ID NO: 6745 - DNA, 164 bp, Artificial Sequence; identical to SEQ ID NO: 6744
  Synthetic polynucleotide

SEQ ID NO: 6746 - DNA, 172 bp, Artificial Sequence
  Synthetic polynucleotide
atcatctcaccttgcctcctggagcaagctttgcatcacctgcaggggtgacgtgaagaggtgacgtgatcgggtgacgtgagacggtgacgtgactaggtgacgtgaactggtgacgtgatgcggtgacgtgagtaggtgacgtgaggcgcgccatgcttcatcagactct

SEQ ID NO: 6747 - DNA, 172 bp, Artificial Sequence; identical to SEQ ID NO: 6746
  Synthetic polynucleotide

SEQ ID NO: 6748 - DNA, 188 bp, Artificial Sequence
  Synthetic polynucleotide
atcatctcaccttgcctcctgccgtgaccttaacagcgcctgcaggttgcgcaatcttagattgcgcaatctttcgttgcgcaatcttgacttgcgcaatcttctattgcgcaatcttactttgcgcaatctttgcttgcgcaatcttgtattgcgcaatcttggcgcgccatgcttcatcagactct

SEQ ID NO: 6749 - DNA, 188 bp, Artificial Sequence; identical to SEQ ID NO: 6748
  Synthetic polynucleotide

SEQ ID NO: 6750 - DNA, 180 bp, Artificial Sequence
  Synthetic polynucleotide
atcatctcaccttgcctcctgatggtcccgaatacagacctgcaggcgccggaagtgagacgccggaagtgtcgcgccggaagtggaccgccggaagtgctacgccggaagtgactcgccggaagtgtgccgccggaagtggtacgccggaagtgggcgcgccatgcttcatcagactct

SEQ ID NO: 6751 - DNA, 180 bp, Artificial Sequence; identical to SEQ ID NO: 6750
  Synthetic polynucleotide

SEQ ID NO: 6752 - DNA, 197 bp, Artificial Sequence
  Synthetic polynucleotide
atcatctcaccttgcctcctgatgttccctcgtctcctcctgcagggtagggcaaaggtcaagagtagggcaaaggtcatcggtagggcaaaggtcagacgtagggcaaaggtcactagtagggcaaaggtcaactgtagggcaaaggtcatgcgtagggcaaaggtcagtaggcgcgccatgcttcatcagactct

SEQ ID NO: 6753 - DNA, 197 bp, Artificial Sequence; identical to SEQ ID NO: 6752
  Synthetic polynucleotide

SEQ ID NO: 6754 - DNA, 156 bp, Artificial Sequence
  Synthetic polynucleotide
atcatctcaccttgcctcctgggaagccgggattagaccctgcaggtgttatttagatgttattttcgtgttatttgactgttatttctatgttatttacttgttattttgctgttatttgtatgttatttggcgcgccatgcttcatcagactct

SEQ ID NO: 6755 - DNA, 156 bp, Artificial Sequence; identical to SEQ ID NO: 6754
  Synthetic polynucleotide

SEQ ID NO: 6756 - DNA, 191 bp, Artificial Sequence
  Synthetic polynucleotide
atcatctcaccttgcctcctgcccttgtatacacgtcacctgcaggccagatggcacggacacaacaagaccagatggcacggacacaacatcgccagatggcacggacacaacagacccagatggcacggacacaacactaccagatggcacggacacaacaactggcgcgccatgcttcatcagactct

SEQ ID NO: 6757 - DNA, 191 bp, Artificial Sequence; identical to SEQ ID NO: 6756
  Synthetic polynucleotide

SEQ ID NO: 6758 - DNA, 188 bp, Artificial Sequence
  Synthetic polynucleotide
atcatctcaccttgcctcctggggtcagcaaatgagggcctgcaggattggcgccaaaagaattggcgccaaatcgattggcgccaaagacattggcgccaaactaattggcgccaaaactattggcgccaaatgcattggcgccaaagtaattggcgccaaaggcgcgccatgcttcatcagactct

SEQ ID NO: 6759 - DNA, 188 bp, Artificial Sequence; identical to SEQ ID NO: 6758
  Synthetic polynucleotide

SEQ ID NO: 6760 - DNA, 196 bp, Artificial Sequence
  Synthetic polynucleotide
atcatctcaccttgcctcctgagtgaaacaccgagtaccctgcaggtgccctcagggcaagatgccctcagggcatcgtgccctcagggcagactgccctcagggcactatgccctcagggcaacttgccctcagggcatgctgccctcagggcagtatgccctcagggcaggcgcgccatgcttcatcagactct

SEQ ID NO: 6761 - DNA, 196 bp, Artificial Sequence; identical to SEQ ID NO: 6760
  Synthetic polynucleotide

SEQ ID NO: 6762 - DNA, 191 bp, Artificial Sequence
  Synthetic polynucleotide
atcatctcaccttgcctcctgactcgggatcgacacttcctgcaggaaaataacggtttccatagaaaaataacggtttccattcgaaaataacggtttccatgacaaaataacggtttccatctaaaaataacggtttccatactaaaataacggtttccattgcggcgcgccatgcttcatcagactct

SEQ ID NO: 6763 - DNA, 191 bp, Artificial Sequence; identical to SEQ ID NO: 6762
  Synthetic polynucleotide

SEQ ID NO: 6764 - DNA, 191 bp, Artificial Sequence
  Synthetic polynucleotide
atcatctcaccttgcctcctggagaccctttacggacccctgcaggaattttcaagtggttaaagaaattttcaagtggttaatcgaattttcaagtggttaagacaattttcaagtggttaactaaattttcaagtggttaaactaattttcaagtggttaatgcggcgcgccatgcttcatcagactct

SEQ ID NO: 6765 - DNA, 191 bp, Artificial Sequence; identical to SEQ ID NO: 6764
  Synthetic polynucleotide

SEQ ID NO: 6766 - DNA, 197 bp, Artificial Sequence
  Synthetic polynucleotide
atcatctcaccttgcctcctgtccgtgtgcatttcgcccctgcagggccaccagagggcgcagagccaccagagggcgctcggccaccagagggcgcgacgccaccagagggcgcctagccaccagagggcgcactgccaccagagggcgctgcgccaccagagggcgcgtaggcgcgccatgcttcatcagactct

SEQ ID NO: 6767 - DNA, 197 bp, Artificial Sequence; identical to SEQ ID NO: 6766
  Synthetic polynucleotide

SEQ ID NO: 6768 - DNA, 156 bp, Artificial Sequence
  Synthetic polynucleotide
atcatctcaccttgcctcctgagacaatggaatcacttcctgcaggaaaaaacaagaaaaaaacatcgaaaaaacagacaaaaaacactaaaaaaacaactaaaaaacatgcaaaaaacagtaaaaaaacaggcgcgccatgcttcatcagactct

SEQ ID NO: 6769 - DNA, 156 bp, Artificial Sequence; identical to SEQ ID NO: 6768
  Synthetic polynucleotide

SEQ ID NO: 6770 - DNA, 186 bp, Artificial Sequence
  Synthetic polynucleotide
atcatctcaccttgcctcctgaggagccatcccattgacctgcaggataaaaaacaacacaaataaagaataaaaaacaacacaaataatcgataaaaaacaacacaaataagacataaaaaacaacacaaataactaataaaaaacaacacaaataaactggcgcgccatgcttcatcagactct

SEQ ID NO: 6771 - DNA, 186 bp, Artificial Sequence; identical to SEQ ID NO: 6770
  Synthetic polynucleotide

SEQ ID NO: 6772 - DNA, 172 bp, Artificial Sequence
  Synthetic polynucleotide
atcatctcaccttgcctcctggacagtttgagctgtcccctgcaggacccggaagtagaacccggaagttcgacccggaagtgacacccggaagtctaacccggaagtactacccggaagttgcacccggaagtgtaacccggaagtggcgcgccatgcttcatcagactct

SEQ ID NO: 6773 - DNA, 172 bp, Artificial Sequence; identical to SEQ ID NO: 6772
  Synthetic polynucleotide

SEQ ID NO: 6774 - DNA, 185 bp, Artificial Sequence
  Synthetic polynucleotide
atcatctcaccttgcctcctgtgaataggataactagccctgcagggaggtaattacctcagagagaggtaattacctcagtcggaggtaattacctcaggacgaggtaattacctcagctagaggtaattacctcagactgaggtaattacctcagtgcggcgcgccatgcttcatcagactct

SEQ ID NO: 6775 - DNA, 185 bp, Artificial Sequence; identical to SEQ ID NO: 6774
  Synthetic polynucleotide

SEQ ID NO: 6776 - DNA, 156 bp, Artificial Sequence
  Synthetic polynucleotide
atcatctcaccttgcctcctggtatgcactcaaagggtcctgcagggatcaaagagagatcaaagtcggatcaaaggacgatcaaagctagatcaaagactgatcaaagtgcgatcaaaggtagatcaaagggcgcgccatgcttcatcagactct

SEQ ID NO: 6777 - DNA, 156 bp, Artificial Sequence; identical to SEQ ID NO: 6776
  Synthetic polynucleotide

SEQ ID NO: 6778 - DNA, 197 bp, Artificial Sequence
  Synthetic polynucleotide
atcatctcaccttgcctcctgtataagatgtgcctttgcctgcaggtctgtggggggtctgagatctgtggggggtctgtcgtctgtggggggtctggactctgtggggggtctgctatctgtggggggtctgacttctgtggggggtctgtgctctgtggggggtctggtaggcgcgccatgcttcatcagactct

SEQ ID NO: 6779 - DNA, 197 bp, Artificial Sequence; identical to SEQ ID NO: 6778
  Synthetic polynucleotide

SEQ ID NO: 6780 - DNA, 164 bp, Artificial Sequence
  Synthetic polynucleotide
atcatctcaccttgcctcctggtcagttaatacactcgcctgcaggtttgatgggagatttgatgggtcgtttgatggggactttgatgggctatttgatgggacttttgatgggtgctttgatggggtatttgatgggggcgcgccatgcttcatcagactct

SEQ ID NO: 6781 - DNA, 164 bp, Artificial Sequence; identical to SEQ ID NO: 6780
  Synthetic polynucleotide

SEQ ID NO: 6782 - DNA, 197 bp, Artificial Sequence
  Synthetic polynucleotide
atcatctcaccttgcctcctgcacacgcttcactgacacctgcaggaccaaaatggcggccagaaccaaaatggcggcctcgaccaaaatggcggccgacaccaaaatggcggccctaaccaaaatggcggccactaccaaaatggcggcctgcaccaaaatggcggccgtaggcgcgccatgcttcatcagactct

SEQ ID NO: 6783 - DNA, 197 bp, Artificial Sequence; identical to SEQ ID NO: 6782
  Synthetic polynucleotide

SEQ ID NO: 6784 - DNA, 164 bp, Artificial Sequence
  Synthetic polynucleotide
atcatctcaccttgcctcctgactactccgctgcggttcctgcaggggtttctctagaggtttctcttcgggtttctctgacggtttctctctaggtttctctactggtttctcttgcggtttctctgtaggtttctctggcgcgccatgcttcatcagactct

SEQ ID NO: 6785 - DNA, 164 bp, Artificial Sequence; identical to SEQ ID NO: 6784
  Synthetic polynucleotide

SEQ ID NO: 6786 - DNA, 180 bp, Artificial Sequence
  Synthetic polynucleotide
atcatctcaccttgcctcctggcggttaaaccggttgtcctgcaggtgtttacttagagatgtttacttagtcgtgtttacttaggactgtttacttagctatgtttacttagacttgtttacttagtgctgtttacttaggtatgtttacttagggcgcgccatgcttcatcagactct

SEQ ID NO: 6787 - DNA, 180 bp, Artificial Sequence; identical to SEQ ID NO: 6786
  Synthetic polynucleotide

SEQ ID NO: 6788 - DNA, 186 bp, Artificial Sequence
  Synthetic polynucleotide
atcatctcaccttgcctcctggaattacgaatgtgacacctgcaggcggttacgcttcagtgctctagacggttacgcttcagtgctcttcgcggttacgcttcagtgctctgaccggttacgcttcagtgctctctacggttacgcttcagtgctctactggcgcgccatgcttcatcagactct

SEQ ID NO: 6789 - DNA, 186 bp, Artificial Sequence; identical to SEQ ID NO: 6788
  Synthetic polynucleotide

SEQ ID NO: 6790 - DNA, 185 bp, Artificial Sequence
  Synthetic polynucleotide
atcatctcaccttgcctcctgagttgctaaagtcaaggcctgcaggaaaagctttctaggaaagaaaaagctttctaggaatcgaaaagctttctaggaagacaaaagctttctaggaactaaaaagctttctaggaaactaaaagctttctaggaatgcggcgcgccatgcttcatcagactct

SEQ ID NO: 6791 - DNA, 185 bp, Artificial Sequence; identical to SEQ ID NO: 6790
  Synthetic polynucleotide

SEQ ID NO: 6792 - DNA, 197 bp, Artificial Sequence
  Synthetic polynucleotide
atcatctcaccttgcctcctgcttgtcatctgtcatgccctgcaggtgtcacgcatgactgaacagatgtcacgcatgactgaactcgtgtcacgcatgactgaacgactgtcacgcatgactgaacctatgtcacgcatgactgaacacttgtcacgcatgactgaactgcggcgcgccatgcttcatcagactct

SEQ ID NO: 6793 - DNA, 197 bp, Artificial Sequence; identical to SEQ ID NO: 6792
  Synthetic polynucleotide

SEQ ID NO: 6794 - DNA, 197 bp, Artificial Sequence
  Synthetic polynucleotide
atcatctcaccttgcctcctgccataaagagccatccacctgcaggccgagacccctgcccagaccgagacccctgccctcgccgagacccctgcccgacccgagacccctgcccctaccgagacccctgcccactccgagacccctgccctgcccgagacccctgcccgtaggcgcgccatgcttcatcagactct

SEQ ID NO: 6795 - DNA, 197 bp, Artificial Sequence; identical to SEQ ID NO: 6794
  Synthetic polynucleotide

SEQ ID NO: 6796 - DNA, 172 bp, Artificial Sequence
  Synthetic polynucleotide
atcatctcaccttgcctcctgtaactaagcgtcctagtcctgcaggggtgacgtcaagaggtgacgtcatcgggtgacgtcagacggtgacgtcactaggtgacgtcaactggtgacgtcatgcggtgacgtcagtaggtgacgtcaggcgcgccatgcttcatcagactct

SEQ ID NO: 6797 - DNA, 172 bp, Artificial Sequence; identical to SEQ ID NO: 6796
  Synthetic polynucleotide

SEQ ID NO: 6798 - DNA, 164 bp, Artificial Sequence
  Synthetic polynucleotide
atcatctcaccttgcctcctgtgcggtatttaagtggacctgcaggtggcaacagagatggcaacagtcgtggcaacaggactggcaacagctatggcaacagacttggcaacagtgctggcaacaggtatggcaacagggcgcgccatgcttcatcagactct

SEQ ID NO: 6799 - DNA, 164 bp, Artificial Sequence; identical to SEQ ID NO: 6798
  Synthetic polynucleotide

SEQ ID NO: 6800 - DNA, 140 bp, Artificial Sequence
  Synthetic polynucleotide
atcatctcaccttgcctcctgtcgaacctgcgtattatcctgcaggtgcgtgagatgcgtgtcgtgcgtggactgcgtgctatgcgtgacttgcgtgtgctgcgtggtatgcgtgggcgcgccatgcttcatcagactct

SEQ ID NO: 6801 - DNA, 140 bp, Artificial Sequence; identical to SEQ ID NO: 6800
  Synthetic polynucleotide

SEQ ID NO: 6802 - DNA, 190 bp, Artificial Sequence
  Synthetic polynucleotide
atcatctcaccttgcctcctgactgtcagtatgttgcgcctgcagggttgtaaacaacacagagttgtaaacaacactcggttgtaaacaacacgacgttgtaaacaacacctagttgtaaacaacacactgttgtaaacaacactgcgttgtaaacaacacgtaggcgcgccatgcttcatcagactct

SEQ ID NO: 6803 - DNA, 190 bp, Artificial Sequence; identical to SEQ ID NO: 6802
  Synthetic polynucleotide

SEQ ID NO: 6804 - DNA, 196 bp, Artificial Sequence
  Synthetic polynucleotide
atcatctcaccttgcctcctgatagcctgagagcccatcctgcaggttgttctatttttagaaccacaagattgttctatttttagaaccacatcgttgttctatttttagaaccacagacttgttctatttttagaaccacactattgttctatttttagaaccacaactggcgcgccatgcttcatcagactct

SEQ ID NO: 6805 - DNA, 196 bp, Artificial Sequence; identical to SEQ ID NO: 6804
  Synthetic polynucleotide

SEQ ID NO: 6806 - DNA, 180 bp, Artificial Sequence
  Synthetic polynucleotide
atcatctcaccttgcctcctgtgaccggctatcttcgccctgcagggccacacccacagagccacacccactcggccacacccacgacgccacacccacctagccacacccacactgccacacccactgcgccacacccacgtagccacacccacggcgcgccatgcttcatcagactct

SEQ ID NO: 6807 - DNA, 180 bp, Artificial Sequence; identical to SEQ ID NO: 6806
  Synthetic polynucleotide

SEQ ID NO: 6808 - DNA, 191 bp, Artificial Sequence
  Synthetic polynucleotide
atcatctcaccttgcctcctggtgtaacaggctattaacctgcaggtagtcctttgttcttatagatagtcctttgttcttattcgtagtcctttgttcttatgactagtcctttgttcttatctatagtcctttgttcttatacttagtcctttgttcttattgcggcgcgccatgcttcatcagactct

SEQ ID NO: 6809 - DNA, 191 bp, Artificial Sequence; identical to SEQ ID NO: 6808
  Synthetic polynucleotide

SEQ ID NO: 6810 - DNA, 180 bp, Artificial Sequence
  Synthetic polynucleotide
atcatctcaccttgcctcctgtggcacaggttcatgggcctgcaggtccctggggacagatccctggggactcgtccctggggacgactccctggggacctatccctggggacacttccctggggactgctccctggggacgtatccctggggacggcgcgccatgcttcatcagactct

SEQ ID NO: 6811 - DNA, 180 bp, Artificial Sequence; identical to SEQ ID NO: 6810
  Synthetic polynucleotide

SEQ ID NO: 6812 - DNA, 156 bp, Artificial Sequence
  Synthetic polynucleotide
atcatctcaccttgcctcctgggttatcgcagctctagcctgcaggtttgattaagatttgattatcgtttgattagactttgattactatttgattaacttttgattatgctttgattagtatttgattaggcgcgccatgcttcatcagactct

SEQ ID NO: 6813 - DNA, 156 bp, Artificial Sequence; identical to SEQ ID NO: 6812
  Synthetic polynucleotide

SEQ ID NO: 6814 - DNA, 196 bp, Artificial Sequence
  Synthetic polynucleotide
atcatctcaccttgcctcctggccaactcctacagtagcctgcaggatgtgtttgtttaagaatgtgtttgtttatcgatgtgtttgtttagacatgtgtttgtttactaatgtgtttgtttaactatgtgtttgtttatgcatgtgtttgtttagtaatgtgtttgtttaggcgcgccatgcttcatcagactct

SEQ ID NO: 6815 - DNA, 196 bp, Artificial Sequence; identical to SEQ ID NO: 6814
  Synthetic polynucleotide

SEQ ID NO: 6816 - DNA, 164 bp, Artificial Sequence
  Synthetic polynucleotide
atcatctcaccttgcctcctgatcagccattgcgtcgtcctgcagggtgacgccaagagtgacgccatcggtgacgccagacgtgacgccactagtgacgccaactgtgacgccatgcgtgacgccagtagtgacgccaggcgcgccatgcttcatcagactct

SEQ ID NO: 6817 - DNA, 164 bp, Artificial Sequence; identical to SEQ ID NO: 6816
  Synthetic polynucleotide

SEQ ID NO: 6818 - DNA, 197 bp, Artificial Sequence
  Synthetic polynucleotide
atcatctcaccttgcctcctgtggttagtcaacaccatcctgcagggggtcaagggggtgaagagggtcaagggggtgatcggggtcaagggggtgagacgggtcaagggggtgactagggtcaagggggtgaactgggtcaagggggtgatgcgggtcaagggggtgagtaggcgcgccatgcttcatcagactct

SEQ ID NO: 6819 - DNA, 197 bp, Artificial Sequence; identical to SEQ ID NO: 6818
  Synthetic polynucleotide

SEQ ID NO: 6820 - DNA, 190 bp, Artificial Sequence
  Synthetic polynucleotide
atcatctcaccttgcctcctgtgatcacgaagatacgacctgcaggaacgtgactcagcaagaaacgtgactcagcatcgaacgtgactcagcagacaacgtgactcagcactaaacgtgactcagcaactaacgtgactcagcatgcaacgtgactcagcagtaggcgcgccatgcttcatcagactct

SEQ ID NO: 6821 - DNA, 190 bp, Artificial Sequence; identical to SEQ ID NO: 6820
  Synthetic polynucleotide

SEQ ID NO: 6822 - DNA, 164 bp, Artificial Sequence
  Synthetic polynucleotide
atcatctcaccttgcctcctgggcgagcaagaaccttgcctgcaggtgacgtaagagatgacgtaagtcgtgacgtaaggactgacgtaagctatgacgtaagacttgacgtaagtgctgacgtaaggtatgacgtaagggcgcgccatgcttcatcagactct

SEQ ID NO: 6823 - DNA, 164 bp, Artificial Sequence; identical to SEQ ID NO: 6822
  Synthetic polynucleotide

SEQ ID NO: 6824 - DNA, 156 bp, Artificial Sequence
  Synthetic polynucleotide
atcatctcaccttgcctcctgccgtaccacgcgatttccctgcaggttaatccgagattaatccgtcgttaatccggacttaatccgctattaatccgactttaatccgtgcttaatccggtattaatccgggcgcgccatgcttcatcagactct

SEQ ID NO: 6825 - DNA, 156 bp, Artificial Sequence; identical to SEQ ID NO: 6824
  Synthetic polynucleotide

SEQ ID NO: 6826 - DNA, 188 bp, Artificial Sequence
  Synthetic polynucleotide
atcatctcaccttgcctcctgttgcgctcataagcgagcctgcaggtttccaggaattagatttccaggaatttcgtttccaggaattgactttccaggaattctatttccaggaattacttttccaggaatttgctttccaggaattgtatttccaggaattggcgcgccatgcttcatcagactct

SEQ ID NO: 6827 - DNA, 188 bp, Artificial Sequence; identical to SEQ ID NO: 6826
  Synthetic polynucleotide

SEQ ID NO: 6828 - DNA, 197 bp, Artificial Sequence
  Synthetic polynucleotide
atcatctcaccttgcctcctgcggagagctacatttcgcctgcaggatttgcataacaatgagaatttgcataacaatgtcgatttgcataacaatggacatttgcataacaatgctaatttgcataacaatgactatttgcataacaatgtgcatttgcataacaatggtaggcgcgccatgcttcatcagactct

SEQ ID NO: 6829 - DNA, 197 bp, Artificial Sequence; identical to SEQ ID NO: 6828
  Synthetic polynucleotide

SEQ ID NO: 6830 - DNA, 164 bp, Artificial Sequence
  Synthetic polynucleotide
atcatctcaccttgcctcctggagcacgagtagaatcgcctgcaggaaaagtcaaagaaaaagtcaatcgaaaagtcaagacaaaagtcaactaaaaagtcaaactaaaagtcaatgcaaaagtcaagtaaaaagtcaaggcgcgccatgcttcatcagactct

SEQ ID NO: 6831 - DNA, 164 bp, Artificial Sequence; identical to SEQ ID NO: 6830
  Synthetic polynucleotide

SEQ ID NO: 6832 - DNA, 180 bp, Artificial Sequence
  Synthetic polynucleotide
atcatctcaccttgcctcctggcccatataaatatctccctgcaggctcgcgggaccagactcgcgggacctcgctcgcgggaccgacctcgcgggaccctactcgcgggaccactctcgcgggacctgcctcgcgggaccgtactcgcgggaccggcgcgccatgcttcatcagactct

SEQ ID NO: 6833 - DNA, 180 bp, Artificial Sequence; identical to SEQ ID NO: 6832
  Synthetic polynucleotide

SEQ ID NO: 6834 - DNA, 185 bp, Artificial Sequence
  Synthetic polynucleotide
atcatctcaccttgcctcctgcagaagaggatcacctccctgcaggcagaacagattgtaccagacagaacagattgtacctcgcagaacagattgtaccgaccagaacagattgtaccctacagaacagattgtaccactcagaacagattgtacctgcggcgcgccatgcttcatcagactct

SEQ ID NO: 6835 - DNA, 185 bp, Artificial Sequence; identical to SEQ ID NO: 6834
  Synthetic polynucleotide

SEQ ID NO: 6836 - DNA, 191 bp, Artificial Sequence
  Synthetic polynucleotide
atcatctcaccttgcctcctgcttagattagtaacccgcctgcaggcaaactaattaattatcagacaaactaattaattatctcgcaaactaattaattatcgaccaaactaattaattatcctacaaactaattaattatcactcaaactaattaattatctgcggcgcgccatgcttcatcagactct

SEQ ID NO: 6837 - DNA, 191 bp, Artificial Sequence; identical to SEQ ID NO: 6836
  Synthetic polynucleotide

SEQ ID NO: 6838 - DNA, 188 bp, Artificial Sequence
  Synthetic polynucleotide
atcatctcaccttgcctcctggctattaacttctgaggcctgcaggtattgtttatttagatattgtttattttcgtattgtttatttgactattgtttatttctatattgtttatttacttattgtttattttgctattgtttatttgtatattgtttatttggcgcgccatgcttcatcagactct

SEQ ID NO: 6839 - DNA, 188 bp, Artificial Sequence; identical to SEQ ID NO: 6838
  Synthetic polynucleotide

SEQ ID NO: 6840 - DNA, 191 bp, Artificial Sequence
  Synthetic polynucleotide
atcatctcaccttgcctcctgactaaatcttcgcactacctgcaggctaaggttctagatcacagactaaggttctagatcactcgctaaggttctagatcacgacctaaggttctagatcacctactaaggttctagatcacactctaaggttctagatcactgcggcgcgccatgcttcatcagactct

SEQ ID NO: 6841 - DNA, 191 bp, Artificial Sequence; identical to SEQ ID NO: 6840
  Synthetic polynucleotide

SEQ ID NO: 6842 - DNA, 140 bp, Artificial Sequence
  Synthetic polynucleotide
atcatctcaccttgcctcctggttacgccgatgtcattcctgcaggattaaaagaattaaatcgattaaagacattaaactaattaaaactattaaatgcattaaagtaattaaaggcgcgccatgcttcatcagactct

SEQ ID NO: 6843 - DNA, 140 bp, Artificial Sequence; identical to SEQ ID NO: 6842
  Synthetic polynucleotide

SEQ ID NO: 6844 - DNA, 191 bp, Artificial Sequence
  Synthetic polynucleotide
atcatctcaccttgcctcctgggctggaaacaatggtccctgcaggtcctcctccccctcctcctccagatcctcctccccctcctcctcctcgtcctcctccccctcctcctccgactcctcctccccctcctcctccctatcctcctccccctcctcctccactggcgcgccatgcttcatcagactct

SEQ ID NO: 6845 - DNA, 191 bp, Artificial Sequence; identical to SEQ ID NO: 6844
  Synthetic polynucleotide

SEQ ID NO: 6846 - DNA, 148 bp, Artificial Sequence
  Synthetic polynucleotide
atcatctcaccttgcctcctgttcgacccaggaggaatcctgcaggcagttggagacagttggtcgcagttgggaccagttggctacagttggactcagttggtgccagttgggtacagttggggcgcgccatgcttcatcagactct

SEQ ID NO: 6847 - DNA, 148 bp, Artificial Sequence; identical to SEQ ID NO: 6846
  Synthetic polynucleotide

SEQ ID NO: 6848 - DNA, 180 bp, Artificial Sequence
  Synthetic polynucleotide
atcatctcaccttgcctcctggttgtctaggtacatgtcctgcaggtgtttactcagagatgtttactcagtcgtgtttactcaggactgtttactcagctatgtttactcagacttgtttactcagtgctgtttactcaggtatgtttactcagggcgcgccatgcttcatcagactct

SEQ ID NO: 6849 - DNA, 180 bp, Artificial Sequence; identical to SEQ ID NO: 6848
  Synthetic polynucleotide

SEQ ID NO: 6850 - DNA, 196 bp, Artificial Sequence
  Synthetic polynucleotide
atcatctcaccttgcctcctgacgacagcgctattaggcctgcaggattaattaattttagaattaattaatttttcgattaattaattttgacattaattaattttctaattaattaattttactattaattaatttttgcattaattaattttgtaattaattaattttggcgcgccatgcttcatcagactct

SEQ ID NO: 6851 - DNA, 196 bp, Artificial Sequence; identical to SEQ ID NO: 6850
  Synthetic polynucleotide

SEQ ID NO: 6852 - DNA, 180 bp, Artificial Sequence
  Synthetic polynucleotide
atcatctcaccttgcctcctggtgcaccataaaccgggcctgcaggggtgactcagtagaggtgactcagttcgggtgactcagtgacggtgactcagtctaggtgactcagtactggtgactcagttgcggtgactcagtgtaggtgactcagtggcgcgccatgcttcatcagactct

SEQ ID NO: 6853 - DNA, 180 bp, Artificial Sequence; identical to SEQ ID NO: 6852
  Synthetic polynucleotide

SEQ ID NO: 6854 - DNA, 172 bp, Artificial Sequence
  Synthetic polynucleotide
atcatctcaccttgcctcctgaccatctggtaactcagcctgcagggtcataaaaaagagtcataaaaatcggtcataaaaagacgtcataaaaactagtcataaaaaactgtcataaaaatgcgtcataaaaagtagtcataaaaaggcgcgccatgcttcatcagactct

SEQ ID NO: 6855 - DNA, 172 bp, Artificial Sequence; identical to SEQ ID NO: 6854
  Synthetic polynucleotide

SEQ ID NO: 6856 - DNA, 156 bp, Artificial Sequence
  Synthetic polynucleotide
atcatctcaccttgcctcctgtgagactctaaccataacctgcaggttaatcccagattaatccctcgttaatcccgacttaatcccctattaatcccactttaatccctgcttaatcccgtattaatcccggcgcgccatgcttcatcagactct

SEQ ID NO: 6857 - DNA, 156 bp, Artificial Sequence; identical to SEQ ID NO: 6856
  Synthetic polynucleotide

SEQ ID NO: 6858 - DNA, 172 bp, Artificial Sequence
  Synthetic polynucleotide
atcatctcaccttgcctcctgtccctctgcatggtacgcctgcaggcctgaggcgaagacctgaggcgatcgcctgaggcgagaccctgaggcgactacctgaggcgaactcctgaggcgatgccctgaggcgagtacctgaggcgaggcgcgccatgcttcatcagactct

SEQ ID NO: 6859 - DNA, 172 bp, Artificial Sequence; identical to SEQ ID NO: 6858
  Synthetic polynucleotide

SEQ ID NO: 6860 - DNA, 196 bp, Artificial Sequence
  Synthetic polynucleotide
atcatctcaccttgcctcctgggtcgatcaattgaggccctgcaggagagggggccctaagaagagggggccctatcgagagggggccctagacagagggggccctactaagagggggccctaactagagggggccctatgcagagggggccctagtaagagggggccctaggcgcgccatgcttcatcagactct

SEQ ID NO: 6861 - DNA, 196 bp, Artificial Sequence; identical to SEQ ID NO: 6860
  Synthetic polynucleotide

SEQ ID NO: 6862 - DNA, 164 bp, Artificial Sequence
  Synthetic polynucleotide
atcatctcaccttgcctcctgctactaagctgacggagcctgcaggatatatataagaatatatatatcgatatatatagacatatatatactaatatatataactatatatatatgcatatatatagtaatatatataggcgcgccatgcttcatcagactct

SEQ ID NO: 6863 - DNA, 164 bp, Artificial Sequence; identical to SEQ ID NO: 6862
  Synthetic polynucleotide

SEQ ID NO: 6864 - DNA, 191 bp, Artificial Sequence
  Synthetic polynucleotide
atcatctcaccttgcctcctggagaatgcgtcaaacggcctgcaggcaaagtaattaattatcagacaaagtaattaattatctcgcaaagtaattaattatcgaccaaagtaattaattatcctacaaagtaattaattatcactcaaagtaattaattatctgcggcgcgccatgcttcatcagactct

SEQ ID NO: 6865 - DNA, 191 bp, Artificial Sequence; identical to SEQ ID NO: 6864
  Synthetic polynucleotide

SEQ ID NO: 6866 - DNA, 190 bp, Artificial Sequence
  Synthetic polynucleotide
atcatctcaccttgcctcctgatcgaatatcgcctgatcctgcaggagggtcaatgacctagaagggtcaatgaccttcgagggtcaatgacctgacagggtcaatgacctctaagggtcaatgacctactagggtcaatgaccttgcagggtcaatgacctgtaggcgcgccatgcttcatcagactct

SEQ ID NO: 6867 - DNA, 190 bp, Artificial Sequence; identical to SEQ ID NO: 6866
  Synthetic polynucleotide

SEQ ID NO: 6868 - DNA, 164 bp, Artificial Sequence
  Synthetic polynucleotide
atcatctcaccttgcctcctgagcgagttagatcgtgccctgcaggctaattaccagactaattacctcgctaattaccgacctaattaccctactaattaccactctaattacctgcctaattaccgtactaattaccggcgcgccatgcttcatcagactct

SEQ ID NO: 6869 - DNA, 164 bp, Artificial Sequence; identical to SEQ ID NO: 6868
  Synthetic polynucleotide

SEQ ID NO: 6870 - DNA, 191 bp, Artificial Sequence
  Synthetic polynucleotide
atcatctcaccttgcctcctgattgctggaacagtacacctgcaggcgaattaattaattactagacgaattaattaattacttcgcgaattaattaattactgaccgaattaattaattactctacgaattaattaattactactcgaattaattaattacttgcggcgcgccatgcttcatcagactct

SEQ ID NO: 6871 - DNA, 191 bp, Artificial Sequence; identical to SEQ ID NO: 6870
  Synthetic polynucleotide

SEQ ID NO: 6872 - DNA, 172 bp, Artificial Sequence
  Synthetic polynucleotide
atcatctcaccttgcctcctgagtctgccctatataaacctgcaggtacacctgtcagatacacctgtctcgtacacctgtcgactacacctgtcctatacacctgtcacttacacctgtctgctacacctgtcgtatacacctgtcggcgcgccatgcttcatcagactct

SEQ ID NO: 6873 - DNA, 172 bp, Artificial Sequence; identical to SEQ ID NO: 6872
  Synthetic polynucleotide

SEQ ID NO: 6874 - DNA, 172 bp, Artificial Sequence
  Synthetic polynucleotide
atcatctcaccttgcctcctggggtgacactggtccaacctgcaggttaattggttagattaattggtttcgttaattggttgacttaattggttctattaattggttactttaattggtttgcttaattggttgtattaattggttggcgcgccatgcttcatcagactct

SEQ ID NO: 6875 - DNA, 172 bp, Artificial Sequence; identical to SEQ ID NO: 6874
  Synthetic polynucleotide

SEQ ID NO: 6876 - DNA, 191 bp, Artificial Sequence
  Synthetic polynucleotide
atcatctcaccttgcctcctgggagagtttcgtgtttccctgcaggaaccggtttaaccggttagaaaccggtttaaccggtttcgaaccggtttaaccggttgacaaccggtttaaccggttctaaaccggtttaaccggttactaaccggtttaaccggtttgcggcgcgccatgcttcatcagactct

SEQ ID NO: 6877 - DNA, 191 bp, Artificial Sequence; identical to SEQ ID NO: 6876
  Synthetic polynucleotide

SEQ ID NO: 6878 - DNA, 188 bp, Artificial Sequence
  Synthetic polynucleotide
atcatctcaccttgcctcctgttagcagcggtcgagtccctgcagggagctgtcatttagagagctgtcattttcggagctgtcatttgacgagctgtcatttctagagctgtcatttactgagctgtcattttgcgagctgtcatttgtagagctgtcatttggcgcgccatgcttcatcagactct

SEQ ID NO: 6879 - DNA, 188 bp, Artificial Sequence; identical to SEQ ID NO: 6878
  Synthetic polynucleotide

SEQ ID NO: 6880 - DNA, 180 bp, Artificial Sequence
  Synthetic polynucleotide
atcatctcaccttgcctcctgtgggagagcgtgtatggcctgcaggggtggggtgagagaggtggggtgagtcgggtggggtgaggacggtggggtgagctaggtggggtgagactggtggggtgagtgcggtggggtgaggtaggtggggtgagggcgcgccatgcttcatcagactct

SEQ ID NO: 6881 - DNA, 180 bp, Artificial Sequence; identical to SEQ ID NO: 6880
  Synthetic polynucleotide

SEQ ID NO: 6882 - DNA, 172 bp, Artificial Sequence
  Synthetic polynucleotide
atcatctcaccttgcctcctgcacatgcagggaacatacctgcaggtttttatgacagatttttatgactcgtttttatgacgactttttatgacctatttttatgacacttttttatgactgctttttatgacgtatttttatgacggcgcgccatgcttcatcagactct

SEQ ID NO: 6883 - DNA, 172 bp, Artificial Sequence; identical to SEQ ID NO: 6882
  Synthetic polynucleotide

SEQ ID NO: 6884 - DNA, 191 bp, Artificial Sequence
  Synthetic polynucleotide
atcatctcaccttgcctcctgcgagatagttaagtctgcctgcagggcctgctgggagttgtagtccagagcctgctgggagttgtagtcctcggcctgctgggagttgtagtccgacgcctgctgggagttgtagtccctagcctgctgggagttgtagtccactggcgcgccatgcttcatcagactct

SEQ ID NO: 6885 - DNA, 191 bp, Artificial Sequence; identical to SEQ ID NO: 6884
  Synthetic polynucleotide

SEQ ID NO: 6886 - DNA, 191 bp, Artificial Sequence
  Synthetic polynucleotide
atcatctcaccttgcctcctgaagcattaaggcatatgcctgcaggaggtacacggtgtacccagaaggtacacggtgtaccctcgaggtacacggtgtacccgacaggtacacggtgtacccctaaggtacacggtgtacccactaggtacacggtgtaccctgcggcgcgccatgcttcatcagactct

SEQ ID NO: 6887 - DNA, 191 bp, Artificial Sequence; identical to SEQ ID NO: 6886
  Synthetic polynucleotide

SEQ ID NO: 6888 - DNA, 156 bp, Artificial Sequence
  Synthetic polynucleotide
atcatctcaccttgcctcctgtctgcaacggctaaccacctgcaggggtatcatagaggtatcattcgggtatcatgacggtatcatctaggtatcatactggtatcattgcggtatcatgtaggtatcatggcgcgccatgcttcatcagactct

SEQ ID NO: 6889 - DNA, 156 bp, Artificial Sequence; identical to SEQ ID NO: 6888
  Synthetic polynucleotide

SEQ ID NO: 6890 - DNA, 190 bp, Artificial Sequence
  Synthetic polynucleotide
atcatctcaccttgcctcctggcccagcgaacatcacacctgcaggagcatgactcagcaagaagcatgactcagcatcgagcatgactcagcagacagcatgactcagcactaagcatgactcagcaactagcatgactcagcatgcagcatgactcagcagtaggcgcgccatgcttcatcagactct

SEQ ID NO: 6891 - DNA, 190 bp, Artificial Sequence; identical to SEQ ID NO: 6890
  Synthetic polynucleotide

SEQ ID NO: 6892 - DNA, 197 bp, Artificial Sequence
  Synthetic polynucleotide
atcatctcaccttgcctcctgttcttgacgttatgtgtcctgcaggatattcgcgattattagaatattcgcgattatttcgatattcgcgattattgacatattcgcgattattctaatattcgcgattattactatattcgcgattatttgcatattcgcgattattgtaggcgcgccatgcttcatcagactct

SEQ ID NO: 6893 - DNA, 197 bp, Artificial Sequence; identical to SEQ ID NO: 6892
  Synthetic polynucleotide

SEQ ID NO: 6894 - DNA, 164 bp, Artificial Sequence
  Synthetic polynucleotide
atcatctcaccttgcctcctggatacgacaagcgttaccctgcagggtgacgtcaagagtgacgtcatcggtgacgtcagacgtgacgtcactagtgacgtcaactgtgacgtcatgcgtgacgtcagtagtgacgtcaggcgcgccatgcttcatcagactct

SEQ ID NO: 6895 - DNA, 164 bp, Artificial Sequence; identical to SEQ ID NO: 6894
  Synthetic polynucleotide

SEQ ID NO: 6896 - DNA, 185 bp, Artificial Sequence
  Synthetic polynucleotide
atcatctcaccttgcctcctgtgttgtttcattagggtcctgcagggttgccatggcgacggagagttgccatggcgacggtcggttgccatggcgacgggacgttgccatggcgacggctagttgccatggcgacggactgttgccatggcgacggtgcggcgcgccatgcttcatcagactct

SEQ ID NO: 6897 - DNA, 185 bp, Artificial Sequence; identical to SEQ ID NO: 6896
  Synthetic polynucleotide

SEQ ID NO: 6898 - DNA, 156 bp, Artificial Sequence
  Synthetic polynucleotide
atcatctcaccttgcctcctgtaaactcattaggcccgcctgcaggttaatcctagattaatccttcgttaatcctgacttaatcctctattaatcctactttaatccttgcttaatcctgtattaatcctggcgcgccatgcttcatcagactct

SEQ ID NO: 6899 - DNA, 156 bp, Artificial Sequence; identical to SEQ ID NO: 6898
  Synthetic polynucleotide

SEQ ID NO: 6900 - DNA, 172 bp, Artificial Sequence
  Synthetic polynucleotide
atcatctcaccttgcctcctgaggaacatcagaatacacctgcagggcatattcatagagcatattcattcggcatattcatgacgcatattcatctagcatattcatactgcatattcattgcgcatattcatgtagcatattcatggcgcgccatgcttcatcagactct

SEQ ID NO: 6901 - DNA, 172 bp, Artificial Sequence; identical to SEQ ID NO: 6900
  Synthetic polynucleotide

SEQ ID NO: 6902 - DNA, 197 bp, Artificial Sequence
  Synthetic polynucleotide
atcatctcaccttgcctcctgcccagttggttcaggcacctgcaggtctgcgtcaacccccagatctgcgtcaaccccctcgtctgcgtcaacccccgactctgcgtcaacccccctatctgcgtcaacccccacttctgcgtcaaccccctgctctgcgtcaacccccgtaggcgcgccatgcttcatcagactct

SEQ ID NO: 6903 - DNA, 197 bp, Artificial Sequence; identical to SEQ ID NO: 6902
  Synthetic polynucleotide

SEQ ID NO: 6904 - DNA, 196 bp, Artificial Sequence
  Synthetic polynucleotide
atcatctcaccttgcctcctggaggttcgagcaatccccctgcaggaacccggaagtaaagaaacccggaagtaatcgaacccggaagtaagacaacccggaagtaactaaacccggaagtaaactaacccggaagtaatgcaacccggaagtaagtaaacccggaagtaaggcgcgccatgcttcatcagactct

SEQ ID NO: 6905 - DNA, 196 bp, Artificial Sequence; identical to SEQ ID NO: 6904
  Synthetic polynucleotide

SEQ ID NO: 6906 - DNA, 190 bp, Artificial Sequence
  Synthetic polynucleotide
atcatctcaccttgcctcctgacaatcttgcccatgtccctgcaggaccatgactcagcaagaaccatgactcagcatcgaccatgactcagcagacaccatgactcagcactaaccatgactcagcaactaccatgactcagcatgcaccatgactcagcagtaggcgcgccatgcttcatcagactct

SEQ ID NO: 6907 - DNA, 190 bp, Artificial Sequence; identical to SEQ ID NO: 6906
  Synthetic polynucleotide

SEQ ID NO: 6908 - DNA, 164 bp, Artificial Sequence
  Synthetic polynucleotide
atcatctcaccttgcctcctgaaatttgcttcctcactcctgcaggtcattaacgagatcattaacgtcgtcattaacggactcattaacgctatcattaacgacttcattaacgtgctcattaacggtatcattaacgggcgcgccatgcttcatcagactct

SEQ ID NO: 6909 - DNA, 164 bp, Artificial Sequence; identical to SEQ ID NO: 6908
  Synthetic polynucleotide

SEQ ID NO: 6910 - DNA, 191 bp, Artificial Sequence
  Synthetic polynucleotide
atcatctcaccttgcctcctggtaccacggagtacatgcctgcaggcctagatggcaggtgggagacctagatggcaggtgggtcgcctagatggcaggtggggaccctagatggcaggtgggctacctagatggcaggtgggactcctagatggcaggtgggtgcggcgcgccatgcttcatcagactct

SEQ ID NO: 6911 - DNA, 191 bp, Artificial Sequence; identical to SEQ ID NO: 6910
  Synthetic polynucleotide

SEQ ID NO: 6912 - DNA, 164 bp, Artificial Sequence
  Synthetic polynucleotide
atcatctcaccttgcctcctgcgttccctgttgtggtgcctgcaggataattgccagaataattgcctcgataattgccgacataattgccctaataattgccactataattgcctgcataattgccgtaataattgccggcgcgccatgcttcatcagactct

SEQ ID NO: 6913 - DNA, 164 bp, Artificial Sequence; identical to SEQ ID NO: 6912
  Synthetic polynucleotide

SEQ ID NO: 6914 - DNA, 191 bp, Artificial Sequence
  Synthetic polynucleotide
atcatctcaccttgcctcctggtgaatccgcgtggagacctgcagggcagccgctgggagcggagagcagccgctgggagcggtcggcagccgctgggagcgggacgcagccgctgggagcggctagcagccgctgggagcggactgcagccgctgggagcggtgcggcgcgccatgcttcatcagactct

SEQ ID NO: 6915 - DNA, 191 bp, Artificial Sequence; identical to SEQ ID NO: 6914
  Synthetic polynucleotide

SEQ ID NO: 6916 - DNA, 190 bp, Artificial Sequence
  Synthetic polynucleotide
atcatctcaccttgcctcctgtgagctttaaatcgtcccctgcaggtgctttcactttccagatgctttcactttcctcgtgctttcactttccgactgctttcactttccctatgctttcactttccacttgctttcactttcctgctgctttcactttccgtaggcgcgccatgcttcatcagactct

SEQ ID NO: 6917 - DNA, 190 bp, Artificial Sequence; identical to SEQ ID NO: 6916
  Synthetic polynucleotide

SEQ ID NO: 6918 - DNA, 185 bp, Artificial Sequence
  Synthetic polynucleotide
atcatctcaccttgcctcctgcgtgttgagagtcaccccctgcagggagtgctgtgatttatagagagtgctgtgatttattcggagtgctgtgatttatgacgagtgctgtgatttatctagagtgctgtgatttatactgagtgctgtgatttattgcggcgcgccatgcttcatcagactct

SEQ ID NO: 6919 - DNA, 185 bp, Artificial Sequence; identical to SEQ ID NO: 6918
  Synthetic polynucleotide

SEQ ID NO: 6920 - DNA, 172 bp, Artificial Sequence
  Synthetic polynucleotide
atcatctcaccttgcctcctgctagagcaagctgcatgcctgcaggcaaatcactgagacaaatcactgtcgcaaatcactggaccaaatcactgctacaaatcactgactcaaatcactgtgccaaatcactggtacaaatcactgggcgcgccatgcttcatcagactct

SEQ ID NO: 6921 - DNA, 172 bp, Artificial Sequence; identical to SEQ ID NO: 6920
  Synthetic polynucleotide

SEQ ID NO: 6922 - DNA, 186 bp, Artificial Sequence
  Synthetic polynucleotide
atcatctcaccttgcctcctgtggtgaacgacggataccctgcaggagcagccaagatggccgcggagaagcagccaagatggccgcggtcgagcagccaagatggccgcgggacagcagccaagatggccgcggctaagcagccaagatggccgcggactggcgcgccatgcttcatcagactct

SEQ ID NO: 6923 - DNA, 186 bp, Artificial Sequence; identical to SEQ ID NO: 6922
  Synthetic polynucleotide

SEQ ID NO: 6924 - DNA, 156 bp, Artificial Sequence
  Synthetic polynucleotide
atcatctcaccttgcctcctgcgtgaccacgcttacaccctgcaggccaattatagaccaattattcgccaattatgacccaattatctaccaattatactccaattattgcccaattatgtaccaattatggcgcgccatgcttcatcagactct

SEQ ID NO: 6925 - DNA, 156 bp, Artificial Sequence; identical to SEQ ID NO: 6924
  Synthetic polynucleotide

SEQ ID NO: 6926 - DNA, 190 bp, Artificial Sequence
  Synthetic polynucleotide
atcatctcaccttgcctcctgcacgaagggctgacttacctgcaggtttgcctagtaactagatttgcctagtaacttcgtttgcctagtaactgactttgcctagtaactctatttgcctagtaactacttttgcctagtaacttgctttgcctagtaactgtaggcgcgccatgcttcatcagactct

SEQ ID NO: 6927 - DNA, 190 bp, Artificial Sequence; identical to SEQ ID NO: 6926
  Synthetic polynucleotide

SEQ ID NO: 6928 - DNA, 196 bp, Artificial Sequence
  Synthetic polynucleotide
atcatctcaccttgcctcctgtatcgctgccagccaatcctgcaggaccacctgttgcaagaaccacctgttgcatcgaccacctgttgcagacaccacctgttgcactaaccacctgttgcaactaccacctgttgcatgcaccacctgttgcagtaaccacctgttgcaggcgcgccatgcttcatcagactct

SEQ ID NO: 6929 - DNA, 196 bp, Artificial Sequence; identical to SEQ ID NO: 6928
  Synthetic polynucleotide

SEQ ID NO: 6930 - DNA, 191 bp, Artificial Sequence
  Synthetic polynucleotide
atcatctcaccttgcctcctgaacttgctagggcccgacctgcaggtacatgtgcacataaaaagatacatgtgcacataaaatcgtacatgtgcacataaaagactacatgtgcacataaaactatacatgtgcacataaaaacttacatgtgcacataaaatgcggcgcgccatgcttcatcagactct

SEQ ID NO: 6931 - DNA, 191 bp, Artificial Sequence; identical to SEQ ID NO: 6930
  Synthetic polynucleotide

SEQ ID NO: 6932 - DNA, 172 bp, Artificial Sequence
  Synthetic polynucleotide
atcatctcaccttgcctcctgtagtcgagcctatcgaacctgcaggattgcgcaatagaattgcgcaattcgattgcgcaatgacattgcgcaatctaattgcgcaatactattgcgcaattgcattgcgcaatgtaattgcgcaatggcgcgccatgcttcatcagactct

SEQ ID NO: 6933 - DNA, 172 bp, Artificial Sequence; identical to SEQ ID NO: 6932
  Synthetic polynucleotide

SEQ ID NO: 6934 - DNA, 156 bp, Artificial Sequence
  Synthetic polynucleotide
atcatctcaccttgcctcctggtgaccctgtgtgcatccctgcaggttaattgcagattaattgctcgttaattgcgacttaattgcctattaattgcactttaattgctgcttaattgcgtattaattgcggcgcgccatgcttcatcagactct

SEQ ID NO: 6935 - DNA, 156 bp, Artificial Sequence; identical to SEQ ID NO: 6934
  Synthetic polynucleotide

SEQ ID NO: 6936 - DNA, 196 bp, Artificial Sequence
  Synthetic polynucleotide
atcatctcaccttgcctcctggtaggagggcagaagatcctgcaggtgacagctgctgcagatgacagctgctgctcgtgacagctgctgcgactgacagctgctgcctatgacagctgctgcacttgacagctgctgctgctgacagctgctgcgtatgacagctgctgcggcgcgccatgcttcatcagactct

SEQ ID NO: 6937 - DNA, 196 bp, Artificial Sequence; identical to SEQ ID NO: 6936
  Synthetic polynucleotide

SEQ ID NO: 6938 - DNA, 195 bp, Artificial Sequence
  Synthetic polynucleotide
atcatctcaccttgcctcctgaatcaatcggtcgtggacctgcaggtcgaggcgcaatgatgcgtagccgccccagatcgaggcgcaatgatgcgtagccgcccctcgtcgaggcgcaatgatgcgtagccgccccgactcgaggcgcaatgatgcgtagccgccccctaggcgcgccatgcttcatcagactct

SEQ ID NO: 6939 - DNA, 195 bp, Artificial Sequence; identical to SEQ ID NO: 6938
  Synthetic polynucleotide

SEQ ID NO: 6940 - DNA, 196 bp, Artificial Sequence
  Synthetic polynucleotide
atcatctcaccttgcctcctgtgtggacagaagtacctcctgcagggaaaagtgaaaccagagaaaagtgaaacctcggaaaagtgaaaccgacgaaaagtgaaaccctagaaaagtgaaaccactgaaaagtgaaacctgcgaaaagtgaaaccgtagaaaagtgaaaccggcgcgccatgcttcatcagactct

SEQ ID NO: 6941 - DNA, 196 bp, Artificial Sequence; identical to SEQ ID NO: 6940
  Synthetic polynucleotide

SEQ ID NO: 6942 - DNA, 197 bp, Artificial Sequence
  Synthetic polynucleotide
atcatctcaccttgcctcctggttacatgtgacggacccctgcagggccatctccttatatgggagagccatctccttatatgggtcggccatctccttatatggggacgccatctccttatatgggctagccatctccttatatgggactgccatctccttatatgggtgcggcgcgccatgcttcatcagactct

SEQ ID NO: 6943 - DNA, 197 bp, Artificial Sequence; identical to SEQ ID NO: 6942
  Synthetic polynucleotide

SEQ ID NO: 6944 - DNA, 185 bp, Artificial Sequence
  Synthetic polynucleotide
atcatctcaccttgcctcctgactggtgttagaacgaacctgcaggttacctgattaggaaaagattacctgattaggaaatcgttacctgattaggaaagacttacctgattaggaaactattacctgattaggaaaactttacctgattaggaaatgcggcgcgccatgcttcatcagactct

SEQ ID NO: 6945 - DNA, 185 bp, Artificial Sequence; identical to SEQ ID NO: 6944
  Synthetic polynucleotide

SEQ ID NO: 6946 - DNA, 180 bp, Artificial Sequence
  Synthetic polynucleotide
atcatctcaccttgcctcctgtcctttgataccaccgtcctgcaggattgtgtccgtagaattgtgtccgttcgattgtgtccgtgacattgtgtccgtctaattgtgtccgtactattgtgtccgttgcattgtgtccgtgtaattgtgtccgtggcgcgccatgcttcatcagactct

SEQ ID NO: 6947 - DNA, 180 bp, Artificial Sequence; identical to SEQ ID NO: 6946
  Synthetic polynucleotide

SEQ ID NO: 6948 - DNA, 156 bp, Artificial Sequence
  Synthetic polynucleotide
atcatctcaccttgcctcctgctattgcctcgatatgacctgcaggttaattgaagattaattgatcgttaattgagacttaattgactattaattgaactttaattgatgcttaattgagtattaattgaggcgcgccatgcttcatcagactct

SEQ ID NO: 6949 - DNA, 156 bp, Artificial Sequence; identical to SEQ ID NO: 6948
  Synthetic polynucleotide

SEQ ID NO: 6950 - DNA, 156 bp, Artificial Sequence
  Synthetic polynucleotide
atcatctcaccttgcctcctggcaaggtgcctcaactacctgcaggccaattagagaccaattagtcgccaattaggacccaattagctaccaattagactccaattagtgcccaattaggtaccaattagggcgcgccatgcttcatcagactct

SEQ ID NO: 6951 - DNA, 156 bp, Artificial Sequence; identical to SEQ ID NO: 6950
  Synthetic polynucleotide

SEQ ID NO: 6952 - DNA, 190 bp, Artificial Sequence
  Synthetic polynucleotide
atcatctcaccttgcctcctgcgttgtttgggagcttgcctgcagggcgtttatggcgacagagcgtttatggcgactcggcgtttatggcgacgacgcgtttatggcgacctagcgtttatggcgacactgcgtttatggcgactgcgcgtttatggcgacgtaggcgcgccatgcttcatcagactct

SEQ ID NO: 6953 - DNA, 190 bp, Artificial Sequence; identical to SEQ ID NO: 6952
  Synthetic polynucleotide

SEQ ID NO: 6954 - DNA, 164 bp, Artificial Sequence
  Synthetic polynucleotide
atcatctcaccttgcctcctggctctattgctcagtatcctgcaggctaattaatagactaattaattcgctaattaatgacctaattaatctactaattaatactctaattaattgcctaattaatgtactaattaatggcgcgccatgcttcatcagactct

SEQ ID NO: 6955 - DNA, 164 bp, Artificial Sequence; identical to SEQ ID NO: 6954
  Synthetic polynucleotide

SEQ ID NO: 6956 - DNA, 197 bp, Artificial Sequence
  Synthetic polynucleotide
atcatctcaccttgcctcctgcttaggtaacaggttggcctgcaggttgatacattgttgcagattgatacattgttgctcgttgatacattgttgcgacttgatacattgttgcctattgatacattgttgcactttgatacattgttgctgcttgatacattgttgcgtaggcgcgccatgcttcatcagactct

SEQ ID NO: 6957 - DNA, 197 bp, Artificial Sequence; identical to SEQ ID NO: 6956
  Synthetic polynucleotide

SEQ ID NO: 6958 - DNA, 180 bp, Artificial Sequence
  Synthetic polynucleotide
atcatctcaccttgcctcctgaaatgagggagatcgtccctgcaggaacacctgttgagaaacacctgttgtcgaacacctgttggacaacacctgttgctaaacacctgttgactaacacctgttgtgcaacacctgttggtaaacacctgttgggcgcgccatgcttcatcagactct

SEQ ID NO: 6959 - DNA, 180 bp, Artificial Sequence; identical to SEQ ID NO: 6958
  Synthetic polynucleotide

SEQ ID NO: 6960 - DNA, 191 bp, Artificial Sequence
  Synthetic polynucleotide
atcatctcaccttgcctcctggactgctagttaagatccctgcaggcggccaccagggggcgccgggagacggccaccagggggcgccgggtcgcggccaccagggggcgccggggaccggccaccagggggcgccgggctacggccaccagggggcgccgggactggcgcgccatgcttcatcagactct

SEQ ID NO: 6961 - DNA, 191 bp, Artificial Sequence; identical to SEQ ID NO: 6960
  Synthetic polynucleotide

SEQ ID NO: 6962 - DNA, 191 bp, Artificial Sequence
  Synthetic polynucleotide
atcatctcaccttgcctcctgcagagctggcactaaggcctgcaggcggccaccagggggcgccggaagacggccaccagggggcgccggatcgcggccaccagggggcgccggagaccggccaccagggggcgccggactacggccaccagggggcgccggaactggcgcgccatgcttcatcagactct

SEQ ID NO: 6963 - DNA, 191 bp, Artificial Sequence; identical to SEQ ID NO: 6962
  Synthetic polynucleotide

SEQ ID NO: 6964 - DNA, 156 bp, Artificial Sequence
  Synthetic polynucleotide
atcatctcaccttgcctcctgcgagaacggcgaatcctcctgcaggccaattacagaccaattactcgccaattacgacccaattacctaccaattacactccaattactgcccaattacgtaccaattacggcgcgccatgcttcatcagactct

SEQ ID NO: 6965 - DNA, 156 bp, Artificial Sequence; identical to SEQ ID NO: 6964
  Synthetic polynucleotide

SEQ ID NO: 6966 - DNA, 156 bp, Artificial Sequence
  Synthetic polynucleotide
atcatctcaccttgcctcctgcctctgacacaaagacccctgcaggccaattaaagaccaattaatcgccaattaagacccaattaactaccaattaaactccaattaatgcccaattaagtaccaattaaggcgcgccatgcttcatcagactct

SEQ ID NO: 6967 - DNA, 156 bp, Artificial Sequence; identical to SEQ ID NO: 6966
  Synthetic polynucleotide

SEQ ID NO: 6968 - DNA, 186 bp, Artificial Sequence
  Synthetic polynucleotide
atcatctcaccttgcctcctggtttcagccatttcctccctgcaggtggccaccagggggcgctatagatggccaccagggggcgctattcgtggccaccagggggcgctatgactggccaccagggggcgctatctatggccaccagggggcgctatactggcgcgccatgcttcatcagactct

SEQ ID NO: 6969 - DNA, 186 bp, Artificial Sequence; identical to SEQ ID NO: 6968
  Synthetic polynucleotide

SEQ ID NO: 6970 - DNA, 156 bp, Artificial Sequence
  Synthetic polynucleotide
atcatctcaccttgcctcctgctgttaggagtgtaaagcctgcagggacaggtgagagacaggtgtcggacaggtggacgacaggtgctagacaggtgactgacaggtgtgcgacaggtggtagacaggtgggcgcgccatgcttcatcagactct

SEQ ID NO: 6971 - DNA, 156 bp, Artificial Sequence; identical to SEQ ID NO: 6970
  Synthetic polynucleotide

SEQ ID NO: 6972 - DNA, 197 bp, Artificial Sequence
  Synthetic polynucleotide
atcatctcaccttgcctcctgaattgagacctacttctcctgcaggggtgaacttgaacttgagagaggtgaacttgaacttgagtcgggtgaacttgaacttgaggacggtgaacttgaacttgagctaggtgaacttgaacttgagactggtgaacttgaacttgagtgcggcgcgccatgcttcatcagactct

SEQ ID NO: 6973 - DNA, 197 bp, Artificial Sequence; identical to SEQ ID NO: 6972
  Synthetic polynucleotide

SEQ ID NO: 6974 - DNA, 172 bp, Artificial Sequence
  Synthetic polynucleotide
atcatctcaccttgcctcctgggtagtggactacgaagcctgcagggggaattgtaagagggaattgtatcggggaattgtagacgggaattgtactagggaattgtaactgggaattgtatgcgggaattgtagtagggaattgtaggcgcgccatgcttcatcagactct

SEQ ID NO: 6975 - DNA, 172 bp, Artificial Sequence; identical to SEQ ID NO: 6974
  Synthetic polynucleotide

SEQ ID NO: 6976 - DNA, 180 bp, Artificial Sequence
  Synthetic polynucleotide
atcatctcaccttgcctcctgaaagatgaccagtttgtcctgcaggccccccgcctcagaccccccgcctctcgccccccgcctcgacccccccgcctcctaccccccgcctcactccccccgcctctgcccccccgcctcgtaccccccgcctcggcgcgccatgcttcatcagactct

SEQ ID NO: 6977 - DNA, 180 bp, Artificial Sequence; identical to SEQ ID NO: 6976
  Synthetic polynucleotide

SEQ ID NO: 6978 - DNA, 164 bp, Artificial Sequence
  Synthetic polynucleotide
atcatctcaccttgcctcctgttgcaggtgcgtttgaacctgcaggttaatcgctagattaatcgcttcgttaatcgctgacttaatcgctctattaatcgctactttaatcgcttgcttaatcgctgtattaatcgctggcgcgccatgcttcatcagactct

SEQ ID NO: 6979 - DNA, 164 bp, Artificial Sequence; identical to SEQ ID NO: 6978
  Synthetic polynucleotide

SEQ ID NO: 6980 - DNA, 172 bp, Artificial Sequence
  Synthetic polynucleotide
atcatctcaccttgcctcctggtgaaggctaaatactgcctgcagggatgacgtcaagagatgacgtcatcggatgacgtcagacgatgacgtcactagatgacgtcaactgatgacgtcatgcgatgacgtcagtagatgacgtcaggcgcgccatgcttcatcagactct

SEQ ID NO: 6981 - DNA, 172 bp, Artificial Sequence; identical to SEQ ID NO: 6980
  Synthetic polynucleotide

SEQ ID NO: 6982 - DNA, 156 bp, Artificial Sequence
  Synthetic polynucleotide
atcatctcaccttgcctcctgttctcgagccaatgaagcctgcaggcattgttaagacattgttatcgcattgttagaccattgttactacattgttaactcattgttatgccattgttagtacattgttaggcgcgccatgcttcatcagactct

SEQ ID NO: 6983 - DNA, 156 bp, Artificial Sequence; identical to SEQ ID NO: 6982
  Synthetic polynucleotide

SEQ ID NO: 6984 - DNA, 156 bp, Artificial Sequence
  Synthetic polynucleotide
atcatctcaccttgcctcctgcactaagttatctgctgcctgcaggcattgttcagacattgttctcgcattgttcgaccattgttcctacattgttcactcattgttctgccattgttcgtacattgttcggcgcgccatgcttcatcagactct

SEQ ID NO: 6985 - DNA, 156 bp, Artificial Sequence; identical to SEQ ID NO: 6984
  Synthetic polynucleotide

SEQ ID NO: 6986 - DNA, 190 bp, Artificial Sequence
  Synthetic polynucleotide
atcatctcaccttgcctcctgttccttcggcagatatgcctgcaggagatcaaggtcataagaagatcaaggtcatatcgagatcaaggtcatagacagatcaaggtcatactaagatcaaggtcataactagatcaaggtcatatgcagatcaaggtcatagtaggcgcgccatgcttcatcagactct

SEQ ID NO: 6987 - DNA, 190 bp, Artificial Sequence; identical to SEQ ID NO: 6986
  Synthetic polynucleotide

SEQ ID NO: 6988 - DNA, 197 bp, Artificial Sequence
  Synthetic polynucleotide
atcatctcaccttgcctcctgccagtatttccaccgatcctgcaggcggctgataccctggagacggctgataccctggtcgcggctgataccctgggaccggctgataccctggctacggctgataccctggactcggctgataccctggtgccggctgataccctgggtaggcgcgccatgcttcatcagactct

SEQ ID NO: 6989 - DNA, 197 bp, Artificial Sequence; identical to SEQ ID NO: 6988
  Synthetic polynucleotide

SEQ ID NO: 6990 - DNA, 188 bp, Artificial Sequence
  Synthetic polynucleotide
atcatctcaccttgcctcctgcttatggaaccagcgggcctgcagggggttcaccgggagagggttcaccgggtcggggttcaccggggacgggttcaccgggctagggttcaccgggactgggttcaccgggtgcgggttcaccggggtagggttcaccgggggcgcgccatgcttcatcagactct

SEQ ID NO: 6991 - DNA, 188 bp, Artificial Sequence; identical to SEQ ID NO: 6990
  Synthetic polynucleotide

SEQ ID NO: 6992 - DNA, 172 bp, Artificial Sequence
  Synthetic polynucleotide
atcatctcaccttgcctcctggcagagcatatgacgcacctgcaggggattcgaacagaggattcgaactcgggattcgaacgacggattcgaacctaggattcgaacactggattcgaactgcggattcgaacgtaggattcgaacggcgcgccatgcttcatcagactct

SEQ ID NO: 6993 - DNA, 172 bp, Artificial Sequence; identical to SEQ ID NO: 6992
  Synthetic polynucleotide

SEQ ID NO: 6994 - DNA, 172 bp, Artificial Sequence
  Synthetic polynucleotide
atcatctcaccttgcctcctgtagggtaatgctgtgtgcctgcaggctatttatagagactatttatagtcgctatttataggacctatttatagctactatttatagactctatttatagtgcctatttataggtactatttatagggcgcgccatgcttcatcagactct

SEQ ID NO: 6995 - DNA, 172 bp, Artificial Sequence; identical to SEQ ID NO: 6994
  Synthetic polynucleotide

SEQ ID NO: 6996 - DNA, 172 bp, Artificial Sequence
  Synthetic polynucleotide
atcatctcaccttgcctcctggccgttcaaggacagagcctgcagggctaattagtagagctaattagttcggctaattagtgacgctaattagtctagctaattagtactgctaattagttgcgctaattagtgtagctaattagtggcgcgccatgcttcatcagactct

SEQ ID NO: 6997 - DNA, 172 bp, Artificial Sequence; identical to SEQ ID NO: 6996
  Synthetic polynucleotide

SEQ ID NO: 6998 - DNA, 190 bp, Artificial Sequence
  Synthetic polynucleotide
atcatctcaccttgcctcctgtggtcacgcttactaggcctgcaggtatgaatattcatgagatatgaatattcatgtcgtatgaatattcatggactatgaatattcatgctatatgaatattcatgacttatgaatattcatgtgctatgaatattcatggtaggcgcgccatgcttcatcagactct

SEQ ID NO: 6999 - DNA, 190 bp, Artificial Sequence; identical to SEQ ID NO: 6998
  Synthetic polynucleotide

SEQ ID NO: 7000 - DNA, 156 bp, Artificial Sequence
  Synthetic polynucleotide
atcatctcaccttgcctcctgcacaagtaggcccacatcctgcaggacgtcatcagaacgtcatctcgacgtcatcgacacgtcatcctaacgtcatcactacgtcatctgcacgtcatcgtaacgtcatcggcgcgccatgcttcatcagactct

SEQ ID NO: 7001 - DNA, 156 bp, Artificial Sequence; identical to SEQ ID NO: 7000
  Synthetic polynucleotide

SEQ ID NO: 7002 - DNA, 180 bp, Artificial Sequence
  Synthetic polynucleotide
atcatctcaccttgcctcctgcaaagttcggtaaaggacctgcaggtccaatccacaagatccaatccacatcgtccaatccacagactccaatccacactatccaatccacaacttccaatccacatgctccaatccacagtatccaatccacaggcgcgccatgcttcatcagactct

SEQ ID NO: 7003 - DNA, 180 bp, Artificial Sequence; identical to SEQ ID NO: 7002
  Synthetic polynucleotide

SEQ ID NO: 7004 - DNA, 191 bp, Artificial Sequence
  Synthetic polynucleotide
atcatctcaccttgcctcctggcctgtctacgagaacacctgcaggtaattaattaatggctaagataattaattaatggctatcgtaattaattaatggctagactaattaattaatggctactataattaattaatggctaacttaattaattaatggctatgcggcgcgccatgcttcatcagactct

SEQ ID NO: 7005 - DNA, 191 bp, Artificial Sequence; identical to SEQ ID NO: 7004
  Synthetic polynucleotide

SEQ ID NO: 7006 - DNA, 172 bp, Artificial Sequence
  Synthetic polynucleotide
atcatctcaccttgcctcctgccttggttgcaatcctccctgcaggattgacagctagaattgacagcttcgattgacagctgacattgacagctctaattgacagctactattgacagcttgcattgacagctgtaattgacagctggcgcgccatgcttcatcagactct

SEQ ID NO: 7007 - DNA, 172 bp, Artificial Sequence; identical to SEQ ID NO: 7006
  Synthetic polynucleotide

SEQ ID NO: 7008 - DNA, 191 bp, Artificial Sequence
  Synthetic polynucleotide
atcatctcaccttgcctcctgcaatgcctttcctgaagcctgcaggatcgaatatatatatctagtcagaatcgaatatatatatctagtctcgatcgaatatatatatctagtcgacatcgaatatatatatctagtcctaatcgaatatatatatctagtcactggcgcgccatgcttcatcagactct

SEQ ID NO: 7009 - DNA, 191 bp, Artificial Sequence; identical to SEQ ID NO: 7008
  Synthetic polynucleotide

SEQ ID NO: 7010 - DNA, 197 bp, Artificial Sequence
  Synthetic polynucleotide
atcatctcaccttgcctcctgtattcagacgctctcgtcctgcaggagcctcagggcatggagaagcctcagggcatggtcgagcctcagggcatgggacagcctcagggcatggctaagcctcagggcatggactagcctcagggcatggtgcagcctcagggcatgggtaggcgcgccatgcttcatcagactct

SEQ ID NO: 7011 - DNA, 197 bp, Artificial Sequence; identical to SEQ ID NO: 7010
  Synthetic polynucleotide

SEQ ID NO: 7012 - DNA, 197 bp, Artificial Sequence
  Synthetic polynucleotide
atcatctcaccttgcctcctgtcaggctgaagcttgaacctgcaggaggacaaagttcacttgaagaaggacaaagttcacttgatcgaggacaaagttcacttgagacaggacaaagttcacttgactaaggacaaagttcacttgaactaggacaaagttcacttgatgcggcgcgccatgcttcatcagactct

SEQ ID NO: 7013 - DNA, 197 bp, Artificial Sequence; identical to SEQ ID NO: 7012
  Synthetic polynucleotide

SEQ ID NO: 7014 - DNA, 172 bp, Artificial Sequence
  Synthetic polynucleotide
atcatctcaccttgcctcctgctgccctatcgcaatcgcctgcagggctaattagaagagctaattagatcggctaattagagacgctaattagactagctaattagaactgctaattagatgcgctaattagagtagctaattagaggcgcgccatgcttcatcagactct

SEQ ID NO: 7015 - DNA, 172 bp, Artificial Sequence; identical to SEQ ID NO: 7014
  Synthetic polynucleotide

SEQ ID NO: 7016 - DNA, 172 bp, Artificial Sequence
  Synthetic polynucleotide
atcatctcaccttgcctcctgaatactgactcaatccacctgcagggctaattagcagagctaattagctcggctaattagcgacgctaattagcctagctaattagcactgctaattagctgcgctaattagcgtagctaattagcggcgcgccatgcttcatcagactct

SEQ ID NO: 7017 - DNA, 172 bp, Artificial Sequence; identical to SEQ ID NO: 7016
  Synthetic polynucleotide

SEQ ID NO: 7018 - DNA, 156 bp, Artificial Sequence
  Synthetic polynucleotide
atcatctcaccttgcctcctgacccagagtccttaggtcctgcaggttaattggagattaattggtcgttaattgggacttaattggctattaattggactttaattggtgcttaattgggtattaattggggcgcgccatgcttcatcagactct

SEQ ID NO: 7019 - DNA, 156 bp, Artificial Sequence; identical to SEQ ID NO: 7018
  Synthetic polynucleotide

SEQ ID NO: 7020 - DNA, 172 bp, Artificial Sequence
  Synthetic polynucleotide
atcatctcaccttgcctcctgtcggctgcgctatgttgcctgcaggaacatctggtagaaacatctggttcgaacatctggtgacaacatctggtctaaacatctggtactaacatctggttgcaacatctggtgtaaacatctggtggcgcgccatgcttcatcagactct

SEQ ID NO: 7021 - DNA, 172 bp, Artificial Sequence; identical to SEQ ID NO: 7020
  Synthetic polynucleotide

SEQ ID NO: 7022 - DNA, 172 bp, Artificial Sequence
  Synthetic polynucleotide
atcatctcaccttgcctcctgcttatgaggtcgggttacctgcaggcgtgggggggagacgtgggggggtcgcgtggggggggaccgtgggggggctacgtgggggggactcgtgggggggtgccgtggggggggtacgtgggggggggcgcgccatgcttcatcagactct

SEQ ID NO: 7023 - DNA, 172 bp, Artificial Sequence; identical to SEQ ID NO: 7022
  Synthetic polynucleotide

SEQ ID NO: 7024 - DNA, 172 bp, Artificial Sequence
  Synthetic polynucleotide
atcatctcaccttgcctcctgaactgctctagccacgtcctgcaggcgcttgactgagacgcttgactgtcgcgcttgactggaccgcttgactgctacgcttgactgactcgcttgactgtgccgcttgactggtacgcttgactgggcgcgccatgcttcatcagactct

SEQ ID NO: 7025 - DNA, 172 bp, Artificial Sequence; identical to SEQ ID NO: 7024
  Synthetic polynucleotide

SEQ ID NO: 7026 - DNA, 172 bp, Artificial Sequence
  Synthetic polynucleotide
atcatctcaccttgcctcctgtctcaacacagccacggcctgcaggtggcagttggagatggcagttggtcgtggcagttgggactggcagttggctatggcagttggacttggcagttggtgctggcagttgggtatggcagttggggcgcgccatgcttcatcagactct

SEQ ID NO: 7027 - DNA, 172 bp, Artificial Sequence; identical to SEQ ID NO: 7026
  Synthetic polynucleotide

SEQ ID NO: 7028 - DNA, 190 bp, Artificial Sequence
  Synthetic polynucleotide
atcatctcaccttgcctcctggaatacaccgtgacctacctgcaggggtgggggaggggcagaggtgggggaggggctcgggtgggggaggggcgacggtgggggaggggcctaggtgggggaggggcactggtgggggaggggctgcggtgggggaggggcgtaggcgcgccatgcttcatcagactct

SEQ ID NO: 7029 - DNA, 190 bp, Artificial Sequence; identical to SEQ ID NO: 7028
  Synthetic polynucleotide

SEQ ID NO: 7030 - DNA, 164 bp, Artificial Sequence
  Synthetic polynucleotide
atcatctcaccttgcctcctgcggatggtttaggtaaccctgcagggcacttaaaagagcacttaaatcggcacttaaagacgcacttaaactagcacttaaaactgcacttaaatgcgcacttaaagtagcacttaaaggcgcgccatgcttcatcagactct

SEQ ID NO: 7031 - DNA, 164 bp, Artificial Sequence; identical to SEQ ID NO: 7030
  Synthetic polynucleotide

SEQ ID NO: 7032 - DNA, 188 bp, Artificial Sequence
  Synthetic polynucleotide
atcatctcaccttgcctcctgctagtatctagtaacgccctgcaggagatgcaatcccagaagatgcaatccctcgagatgcaatcccgacagatgcaatcccctaagatgcaatcccactagatgcaatccctgcagatgcaatcccgtaagatgcaatcccggcgcgccatgcttcatcagactct

SEQ ID NO: 7033 - DNA, 188 bp, Artificial Sequence; identical to SEQ ID NO: 7032
  Synthetic polynucleotide

SEQ ID NO: 7034 - DNA, 180 bp, Artificial Sequence
  Synthetic polynucleotide
atcatctcaccttgcctcctgcgggtcgacatgagaagcctgcagggataatattgaagagataatattgatcggataatattgagacgataatattgactagataatattgaactgataatattgatgcgataatattgagtagataatattgaggcgcgccatgcttcatcagactct

SEQ ID NO: 7035 - DNA, 180 bp, Artificial Sequence; identical to SEQ ID NO: 7034
  Synthetic polynucleotide

SEQ ID NO: 7036 - DNA, 172 bp, Artificial Sequence
  Synthetic polynucleotide
atcatctcaccttgcctcctgagtcaagtgacgctcgacctgcaggtattaatcgaagatattaatcgatcgtattaatcgagactattaatcgactatattaatcgaacttattaatcgatgctattaatcgagtatattaatcgaggcgcgccatgcttcatcagactct

SEQ ID NO: 7037 - DNA, 172 bp, Artificial Sequence; identical to SEQ ID NO: 7036
  Synthetic polynucleotide

SEQ ID NO: 7038 - DNA, 164 bp, Artificial Sequence
  Synthetic polynucleotide
atcatctcaccttgcctcctgacttaccttgatgagcccctgcaggcattgttctagacattgttcttcgcattgttctgaccattgttctctacattgttctactcattgttcttgccattgttctgtacattgttctggcgcgccatgcttcatcagactct

SEQ ID NO: 7039 - DNA, 164 bp, Artificial Sequence; identical to SEQ ID NO: 7038
  Synthetic polynucleotide

SEQ ID NO: 7040 - DNA, 172 bp, Artificial Sequence
  Synthetic polynucleotide
atcatctcaccttgcctcctgccactcgtaacctggaccctgcaggattgttctgcagaattgttctgctcgattgttctgcgacattgttctgcctaattgttctgcactattgttctgctgcattgttctgcgtaattgttctgcggcgcgccatgcttcatcagactct

SEQ ID NO: 7041 - DNA, 172 bp, Artificial Sequence; identical to SEQ ID NO: 7040
  Synthetic polynucleotide

SEQ ID NO: 7042 - DNA, 156 bp, Artificial Sequence
  Synthetic polynucleotide
atcatctcaccttgcctcctgatcgttggtcgcgtttgcctgcagggccattaaagagccattaatcggccattaagacgccattaactagccattaaactgccattaatgcgccattaagtagccattaaggcgcgccatgcttcatcagactct

SEQ ID NO: 7043 - DNA, 156 bp, Artificial Sequence; identical to SEQ ID NO: 7042
  Synthetic polynucleotide

SEQ ID NO: 7044 - DNA, 148 bp, Artificial Sequence
  Synthetic polynucleotide
atcatctcaccttgcctcctgatttgtttcgtcgctgacctgcagggcggcggagagcggcggtcggcggcgggacgcggcggctagcggcggactgcggcggtgcgcggcgggtagcggcggggcgcgccatgcttcatcagactct

SEQ ID NO: 7045 - DNA, 148 bp, Artificial Sequence; identical to SEQ ID NO: 7044
  Synthetic polynucleotide

SEQ ID NO: 7046 - DNA, 156 bp, Artificial Sequence
  Synthetic polynucleotide
atcatctcaccttgcctcctggctcgtctcttagaggccctgcaggtgtatcaaagatgtatcaatcgtgtatcaagactgtatcaactatgtatcaaacttgtatcaatgctgtatcaagtatgtatcaaggcgcgccatgcttcatcagactct

SEQ ID NO: 7047 - DNA, 156 bp, Artificial Sequence; identical to SEQ ID NO: 7046
  Synthetic polynucleotide

SEQ ID NO: 7048 - DNA, 190 bp, Artificial Sequence
  Synthetic polynucleotide
atcatctcaccttgcctcctggcggtgcaatgcaagcacctgcaggttccatatatggaaagattccatatatggaatcgttccatatatggaagacttccatatatggaactattccatatatggaaactttccatatatggaatgcttccatatatggaagtaggcgcgccatgcttcatcagactct

SEQ ID NO: 7049 - DNA, 190 bp, Artificial Sequence; identical to SEQ ID NO: 7048
  Synthetic polynucleotide

SEQ ID NO: 7050 - DNA, 172 bp, Artificial Sequence
  Synthetic polynucleotide
atcatctcaccttgcctcctggcagcgcataccagaagcctgcaggcagtgatttgagacagtgatttgtcgcagtgatttggaccagtgatttgctacagtgatttgactcagtgatttgtgccagtgatttggtacagtgatttgggcgcgccatgcttcatcagactct

SEQ ID NO: 7051 - DNA, 172 bp, Artificial Sequence; identical to SEQ ID NO: 7050
  Synthetic polynucleotide

SEQ ID NO: 7052 - DNA, 148 bp, Artificial Sequence
  Synthetic polynucleotide
atcatctcaccttgcctcctgcagttagtaagtacggccctgcaggaaaatacagaaaaatactcgaaaatacgacaaaatacctaaaaatacactaaaatactgcaaaatacgtaaaaatacggcgcgccatgcttcatcagactct

SEQ ID NO: 7053 - DNA, 148 bp, Artificial Sequence; identical to SEQ ID NO: 7052
  Synthetic polynucleotide

SEQ ID NO: 7054 - DNA, 164 bp, Artificial Sequence
  Synthetic polynucleotide
atcatctcaccttgcctcctgtcgcaaatgatgtatagcctgcaggtttgatgttagatttgatgtttcgtttgatgttgactttgatgttctatttgatgttacttttgatgtttgctttgatgttgtatttgatgttggcgcgccatgcttcatcagactct

SEQ ID NO: 7055 - DNA, 164 bp, Artificial Sequence; identical to SEQ ID NO: 7054
  Synthetic polynucleotide

SEQ ID NO: 7056 - DNA, 148 bp, Artificial Sequence
  Synthetic polynucleotide
atcatctcaccttgcctcctgtgcagactacctccatgcctgcaggtaattaaagataattaatcgtaattaagactaattaactataattaaacttaattaatgctaattaagtataattaaggcgcgccatgcttcatcagactct

SEQ ID NO: 7057 - DNA, 148 bp, Artificial Sequence; identical to SEQ ID NO: 7056
  Synthetic polynucleotide

SEQ ID NO: 7058 - DNA, 156 bp, Artificial Sequence
  Synthetic polynucleotide
atcatctcaccttgcctcctgtcgcatgtaaacattagcctgcagggccattagagagccattagtcggccattaggacgccattagctagccattagactgccattagtgcgccattaggtagccattagggcgcgccatgcttcatcagactct

SEQ ID NO: 7059 - DNA, 156 bp, Artificial Sequence; identical to SEQ ID NO: 7058
  Synthetic polynucleotide

SEQ ID NO: 7060 - DNA, 148 bp, Artificial Sequence
  Synthetic polynucleotide
atcatctcaccttgcctcctggggatattgcgtaaattcctgcaggtaattacagataattactcgtaattacgactaattacctataattacacttaattactgctaattacgtataattacggcgcgccatgcttcatcagactct

SEQ ID NO: 7061 - DNA, 148 bp, Artificial Sequence; identical to SEQ ID NO: 7060
  Synthetic polynucleotide

SEQ ID NO: 7062 - DNA, 156 bp, Artificial Sequence
  Synthetic polynucleotide
atcatctcaccttgcctcctgactaggcacgagtgtgccctgcagggaggtcaaagagaggtcaatcggaggtcaagacgaggtcaactagaggtcaaactgaggtcaatgcgaggtcaagtagaggtcaaggcgcgccatgcttcatcagactct

SEQ ID NO: 7063 - DNA, 156 bp, Artificial Sequence; identical to SEQ ID NO: 7062
  Synthetic polynucleotide

SEQ ID NO: 7064 - DNA, 156 bp, Artificial Sequence
  Synthetic polynucleotide
atcatctcaccttgcctcctgaacaacctttgtcacagcctgcagggaggtcacagagaggtcactcggaggtcacgacgaggtcacctagaggtcacactgaggtcactgcgaggtcacgtagaggtcacggcgcgccatgcttcatcagactct

SEQ ID NO: 7065 - DNA, 156 bp, Artificial Sequence; identical to SEQ ID NO: 7064
  Synthetic polynucleotide

SEQ ID NO: 7066 - DNA, 148 bp, Artificial Sequence
  Synthetic polynucleotide
atcatctcaccttgcctcctgttagtccctagatctaccctgcaggtaattagagataattagtcgtaattaggactaattagctataattagacttaattagtgctaattaggtataattagggcgcgccatgcttcatcagactct

SEQ ID NO: 7067 - DNA, 148 bp, Artificial Sequence; identical to SEQ ID NO: 7066
  Synthetic polynucleotide

SEQ ID NO: 7068 - DNA, 164 bp, Artificial Sequence
  Synthetic polynucleotide
atcatctcaccttgcctcctgctcggcttgctaattgccctgcaggggttggcatagaggttggcattcgggttggcatgacggttggcatctaggttggcatactggttggcattgcggttggcatgtaggttggcatggcgcgccatgcttcatcagactct

SEQ ID NO: 7069 - DNA, 164 bp, Artificial Sequence; identical to SEQ ID NO: 7068
  Synthetic polynucleotide

SEQ ID NO: 7070 - DNA, 156 bp, Artificial Sequence
  Synthetic polynucleotide
atcatctcaccttgcctcctgggtacgagcaatattaccctgcaggatgcgggtagaatgcgggttcgatgcgggtgacatgcgggtctaatgcgggtactatgcgggttgcatgcgggtgtaatgcgggtggcgcgccatgcttcatcagactct

SEQ ID NO: 7071 - DNA, 156 bp, Artificial Sequence; identical to SEQ ID NO: 7070
  Synthetic polynucleotide

SEQ ID NO: 7072 - DNA, 164 bp, Artificial Sequence
  Synthetic polynucleotide
atcatctcaccttgcctcctggtattagacctcacatccctgcaggcccgcccccagacccgccccctcgcccgcccccgaccccgcccccctacccgcccccactcccgccccctgccccgcccccgtacccgcccccggcgcgccatgcttcatcagactct

SEQ ID NO: 7073 - DNA, 164 bp, Artificial Sequence; identical to SEQ ID NO: 7072
  Synthetic polynucleotide

SEQ ID NO: 7074 - DNA, 180 bp, Artificial Sequence
  Synthetic polynucleotide
atcatctcaccttgcctcctggcacaattagtacagatcctgcaggaaaaccgttaaagaaaaaccgttaatcgaaaaccgttaagacaaaaccgttaactaaaaaccgttaaactaaaaccgttaatgcaaaaccgttaagtaaaaaccgttaaggcgcgccatgcttcatcagactct

SEQ ID NO: 7075 - DNA, 180 bp, Artificial Sequence; identical to SEQ ID NO: 7074
  Synthetic polynucleotide

SEQ ID NO: 7076 - DNA, 148 bp, Artificial Sequence
  Synthetic polynucleotide
atcatctcaccttgcctcctgctcatacgcacttcgttcctgcagggtaattaagagtaattatcggtaattagacgtaattactagtaattaactgtaattatgcgtaattagtagtaattaggcgcgccatgcttcatcagactct

SEQ ID NO: 7077 - DNA, 148 bp, Artificial Sequence; identical to SEQ ID NO: 7076
  Synthetic polynucleotide

SEQ ID NO: 7078 - DNA, 180 bp, Artificial Sequence
  Synthetic polynucleotide
atcatctcaccttgcctcctgggctaatgctctgccgacctgcaggggtcacatgacagaggtcacatgactcgggtcacatgacgacggtcacatgacctaggtcacatgacactggtcacatgactgcggtcacatgacgtaggtcacatgacggcgcgccatgcttcatcagactct

SEQ ID NO: 7079 - DNA, 180 bp, Artificial Sequence; identical to SEQ ID NO: 7078
  Synthetic polynucleotide

SEQ ID NO: 7080 - DNA, 197 bp, Artificial Sequence
  Synthetic polynucleotide
atcatctcaccttgcctcctgaccagattgcacccacgcctgcaggcgttgtttacttaagagacgttgtttacttaagtcgcgttgtttacttaaggaccgttgtttacttaagctacgttgtttacttaagactcgttgtttacttaagtgccgttgtttacttaaggtaggcgcgccatgcttcatcagactct

SEQ ID NO: 7081 - DNA, 197 bp, Artificial Sequence; identical to SEQ ID NO: 7080
  Synthetic polynucleotide

SEQ ID NO: 7082 - DNA, 188 bp, Artificial Sequence
  Synthetic polynucleotide
atcatctcaccttgcctcctgggctaatttaggtgaagcctgcaggatcgattattggagaatcgattattggtcgatcgattattgggacatcgattattggctaatcgattattggactatcgattattggtgcatcgattattgggtaatcgattattggggcgcgccatgcttcatcagactct

SEQ ID NO: 7083 - DNA, 188 bp, Artificial Sequence; identical to SEQ ID NO: 7082
  Synthetic polynucleotide

SEQ ID NO: 7084 - DNA, 196 bp, Artificial Sequence
  Synthetic polynucleotide
atcatctcaccttgcctcctgtgtcgcggttgcaatttcctgcaggggttagtattgtgagaggttagtattgtgtcgggttagtattgtggacggttagtattgtgctaggttagtattgtgactggttagtattgtgtgcggttagtattgtggtaggttagtattgtgggcgcgccatgcttcatcagactct

SEQ ID NO: 7085 - DNA, 196 bp, Artificial Sequence; identical to SEQ ID NO: 7084
  Synthetic polynucleotide

SEQ ID NO: 7086 - DNA, 191 bp, Artificial Sequence
  Synthetic polynucleotide
atcatctcaccttgcctcctgattgctgattctacactcctgcaggaaggtcacgaaaggtcaagaaaggtcacgaaaggtcatcgaaggtcacgaaaggtcagacaaggtcacgaaaggtcactaaaggtcacgaaaggtcaactaaggtcacgaaaggtcatgcggcgcgccatgcttcatcagactct

SEQ ID NO: 7087 - DNA, 191 bp, Artificial Sequence; identical to SEQ ID NO: 7086
  Synthetic polynucleotide

SEQ ID NO: 7088 - DNA, 140 bp, Artificial Sequence
  Synthetic polynucleotide
atcatctcaccttgcctcctgctcaaggtgtctagaaacctgcaggcacctgagacacctgtcgcacctggaccacctgctacacctgactcacctgtgccacctggtacacctgggcgcgccatgcttcatcagactct

SEQ ID NO: 7089 - DNA, 140 bp, Artificial Sequence; identical to SEQ ID NO: 7088
  Synthetic polynucleotide

SEQ ID NO: 7090 - DNA, 185 bp, Artificial Sequence
  Synthetic polynucleotide
atcatctcaccttgcctcctgatccacgattcgatttgcctgcagggagaccatctgttcccagagagaccatctgttccctcggagaccatctgttcccgacgagaccatctgttcccctagagaccatctgttcccactgagaccatctgttccctgcggcgcgccatgcttcatcagactct

SEQ ID NO: 7091 - DNA, 185 bp, Artificial Sequence; identical to SEQ ID NO: 7090
  Synthetic polynucleotide

SEQ ID NO: 7092 - DNA, 148 bp, Artificial Sequence
  Synthetic polynucleotide
atcatctcaccttgcctcctgtgcgagctatcctaatgcctgcaggcagattaagacagattatcgcagattagaccagattactacagattaactcagattatgccagattagtacagattaggcgcgccatgcttcatcagactct

SEQ ID NO: 7093 - DNA, 148 bp, Artificial Sequence; identical to SEQ ID NO: 7092
  Synthetic polynucleotide

SEQ ID NO: 7094 - DNA, 156 bp, Artificial Sequence
  Synthetic polynucleotide
atcatctcaccttgcctcctggggatataagagatcaccctgcagggaggtcatagagaggtcattcggaggtcatgacgaggtcatctagaggtcatactgaggtcattgcgaggtcatgtagaggtcatggcgcgccatgcttcatcagactct

SEQ ID NO: 7095 - DNA, 156 bp, Artificial Sequence; identical to SEQ ID NO: 7094
  Synthetic polynucleotide

SEQ ID NO: 7096 - DNA, 148 bp, Artificial Sequence
  Synthetic polynucleotide
atcatctcaccttgcctcctgactagttgtagagagagcctgcagggtaattgagagtaattgtcggtaattggacgtaattgctagtaattgactgtaattgtgcgtaattggtagtaattgggcgcgccatgcttcatcagactct

SEQ ID NO: 7097 - DNA, 148 bp, Artificial Sequence; identical to SEQ ID NO: 7096
  Synthetic polynucleotide

SEQ ID NO: 7098 - DNA, 172 bp, Artificial Sequence
  Synthetic polynucleotide
atcatctcaccttgcctcctgctcttatgtaagggccgcctgcagggccctcttgtagagccctcttgttcggccctcttgtgacgccctcttgtctagccctcttgtactgccctcttgttgcgccctcttgtgtagccctcttgtggcgcgccatgcttcatcagactct

SEQ ID NO: 7099 - DNA, 172 bp, Artificial Sequence; identical to SEQ ID NO: 7098
  Synthetic polynucleotide

SEQ ID NO: 7100 - DNA, 156 bp, Artificial Sequence
  Synthetic polynucleotide
atcatctcaccttgcctcctgccaactggtttcccaatcctgcaggttttgacaagattttgacatcgttttgacagacttttgacactattttgacaactttttgacatgcttttgacagtattttgacaggcgcgccatgcttcatcagactct

SEQ ID NO: 7101 - DNA, 156 bp, Artificial Sequence; identical to SEQ ID NO: 7100
  Synthetic polynucleotide

SEQ ID NO: 7102 - DNA, 156 bp, Artificial Sequence
  Synthetic polynucleotide
atcatctcaccttgcctcctgcctccggtttgcgttgtcctgcaggtcacatgaagatcacatgatcgtcacatgagactcacatgactatcacatgaacttcacatgatgctcacatgagtatcacatgaggcgcgccatgcttcatcagactct

SEQ ID NO: 7103 - DNA, 156 bp, Artificial Sequence; identical to SEQ ID NO: 7102
  Synthetic polynucleotide

SEQ ID NO: 7104 - DNA, 190 bp, Artificial Sequence
  Synthetic polynucleotide
atcatctcaccttgcctcctgtatgaggtaggtggtaacctgcaggacccacaacacataagaacccacaacacatatcgacccacaacacatagacacccacaacacatactaacccacaacacataactacccacaacacatatgcacccacaacacatagtaggcgcgccatgcttcatcagactct

SEQ ID NO: 7105 - DNA, 190 bp, Artificial Sequence; identical to SEQ ID NO: 7104
  Synthetic polynucleotide

SEQ ID NO: 7106 - DNA, 185 bp, Artificial Sequence
  Synthetic polynucleotide
atcatctcaccttgcctcctgtcctaggttgctgttagcctgcagggcccactagagggcacagagcccactagagggcactcggcccactagagggcacgacgcccactagagggcacctagcccactagagggcacactgcccactagagggcactgcggcgcgccatgcttcatcagactct

SEQ ID NO: 7107 - DNA, 185 bp, Artificial Sequence; identical to SEQ ID NO: 7106
  Synthetic polynucleotide

SEQ ID NO: 7108 - DNA, 190 bp, Artificial Sequence
  Synthetic polynucleotide
atcatctcaccttgcctcctgcggtttgcgtacatgagcctgcagggcacccttgggtgcagagcacccttgggtgctcggcacccttgggtgcgacgcacccttgggtgcctagcacccttgggtgcactgcacccttgggtgctgcgcacccttgggtgcgtaggcgcgccatgcttcatcagactct

SEQ ID NO: 7109 - DNA, 190 bp, Artificial Sequence; identical to SEQ ID NO: 7108
  Synthetic polynucleotide

SEQ ID NO: 7110 - DNA, 180 bp, Artificial Sequence
  Synthetic polynucleotide
atcatctcaccttgcctcctgttaggaataaggcaggtcctgcaggttcaaggtcatagattcaaggtcattcgttcaaggtcatgacttcaaggtcatctattcaaggtcatactttcaaggtcattgcttcaaggtcatgtattcaaggtcatggcgcgccatgcttcatcagactct

SEQ ID NO: 7111 - DNA, 180 bp, Artificial Sequence; identical to SEQ ID NO: 7110
  Synthetic polynucleotide

SEQ ID NO: 7112 - DNA, 172 bp, Artificial Sequence
  Synthetic polynucleotide
atcatctcaccttgcctcctgcgggcatttcttgctgacctgcagggcagataacaagagcagataacatcggcagataacagacgcagataacactagcagataacaactgcagataacatgcgcagataacagtagcagataacaggcgcgccatgcttcatcagactct

SEQ ID NO: 7113 - DNA, 172 bp, Artificial Sequence; identical to SEQ ID NO: 7112
  Synthetic polynucleotide

SEQ ID NO: 7114 - DNA, 188 bp, Artificial Sequence
  Synthetic polynucleotide
atcatctcaccttgcctcctgttgaagaccctcacagccctgcaggcgttaattatttagacgttaattattttcgcgttaattatttgaccgttaattatttctacgttaattatttactcgttaattattttgccgttaattatttgtacgttaattatttggcgcgccatgcttcatcagactct

SEQ ID NO: 7115 - DNA, 188 bp, Artificial Sequence; identical to SEQ ID NO: 7114
  Synthetic polynucleotide

SEQ ID NO: 7116 - DNA, 196 bp, Artificial Sequence
  Synthetic polynucleotide
atcatctcaccttgcctcctggataagtcacgggtcgacctgcaggcctgagaataatcagacctgagaataatctcgcctgagaataatcgaccctgagaataatcctacctgagaataatcactcctgagaataatctgccctgagaataatcgtacctgagaataatcggcgcgccatgcttcatcagactct

SEQ ID NO: 7117 - DNA, 196 bp, Artificial Sequence; identical to SEQ ID NO: 7116
  Synthetic polynucleotide

SEQ ID NO: 7118 - DNA, 191 bp, Artificial Sequence
  Synthetic polynucleotide
atcatctcaccttgcctcctgcgggttaggtaacaggccctgcaggcatgactgaaattcatcagacatgactgaaattcatctcgcatgactgaaattcatcgaccatgactgaaattcatcctacatgactgaaattcatcactcatgactgaaattcatctgcggcgcgccatgcttcatcagactct

SEQ ID NO: 7119 - DNA, 191 bp, Artificial Sequence; identical to SEQ ID NO: 7118
  Synthetic polynucleotide

SEQ ID NO: 7120 - DNA, 197 bp, Artificial Sequence
  Synthetic polynucleotide
atcatctcaccttgcctcctgccagctgcgtgcaaactcctgcagggccggccaatcagagagagccggccaatcagagtcggccggccaatcagaggacgccggccaatcagagctagccggccaatcagagactgccggccaatcagagtgcgccggccaatcagaggtaggcgcgccatgcttcatcagactct

SEQ ID NO: 7121 - DNA, 197 bp, Artificial Sequence; identical to SEQ ID NO: 7120
  Synthetic polynucleotide

SEQ ID NO: 7122 - DNA, 180 bp, Artificial Sequence
  Synthetic polynucleotide
atcatctcaccttgcctcctgtagccggaagattgccccctgcaggccagggggcagagaccagggggcagtcgccagggggcaggacccagggggcagctaccagggggcagactccagggggcagtgcccagggggcaggtaccagggggcagggcgcgccatgcttcatcagactct

SEQ ID NO: 7123 - DNA, 180 bp, Artificial Sequence; identical to SEQ ID NO: 7122
  Synthetic polynucleotide

SEQ ID NO: 7124 - DNA, 190 bp, Artificial Sequence
  Synthetic polynucleotide
atcatctcaccttgcctcctgatggcaacataagtacgcctgcaggcccgcttcagtgacagacccgcttcagtgactcgcccgcttcagtgacgaccccgcttcagtgacctacccgcttcagtgacactcccgcttcagtgactgccccgcttcagtgacgtaggcgcgccatgcttcatcagactct

SEQ ID NO: 7125 - DNA, 190 bp, Artificial Sequence; identical to SEQ ID NO: 7124
  Synthetic polynucleotide

SEQ ID NO: 7126 - DNA, 190 bp, Artificial Sequence
  Synthetic polynucleotide
atcatctcaccttgcctcctggttctacgttggcgcgacctgcaggaagggggcgtggccagaaagggggcgtggcctcgaagggggcgtggccgacaagggggcgtggccctaaagggggcgtggccactaagggggcgtggcctgcaagggggcgtggccgtaggcgcgccatgcttcatcagactct

SEQ ID NO: 7127 - DNA, 190 bp, Artificial Sequence; identical to SEQ ID NO: 7126
  Synthetic polynucleotide

SEQ ID NO: 7128 - DNA, 190 bp, Artificial Sequence
  Synthetic polynucleotide
atcatctcaccttgcctcctgtgtaactcgcggtgtaacctgcagggccacttccggttcagagccacttccggttctcggccacttccggttcgacgccacttccggttcctagccacttccggttcactgccacttccggttctgcgccacttccggttcgtaggcgcgccatgcttcatcagactct

SEQ ID NO: 7129 - DNA, 190 bp, Artificial Sequence; identical to SEQ ID NO: 7128
  Synthetic polynucleotide

SEQ ID NO: 7130 - DNA, 185 bp, Artificial Sequence
  Synthetic polynucleotide
atcatctcaccttgcctcctgtgtggtgctcctcctaacctgcaggcaaaatcaattaatttagacaaaatcaattaattttcgcaaaatcaattaatttgaccaaaatcaattaatttctacaaaatcaattaatttactcaaaatcaattaattttgcggcgcgccatgcttcatcagactct

SEQ ID NO: 7131 - DNA, 185 bp, Artificial Sequence; identical to SEQ ID NO: 7130
  Synthetic polynucleotide

SEQ ID NO: 7132 - DNA, 172 bp, Artificial Sequence
  Synthetic polynucleotide
atcatctcaccttgcctcctgaatgcgtggtcttctgtcctgcaggccacttgaaaagaccacttgaaatcgccacttgaaagacccacttgaaactaccacttgaaaactccacttgaaatgcccacttgaaagtaccacttgaaaggcgcgccatgcttcatcagactct

SEQ ID NO: 7133 - DNA, 172 bp, Artificial Sequence; identical to SEQ ID NO: 7132
  Synthetic polynucleotide

SEQ ID NO: 7134 - DNA, 191 bp, Artificial Sequence
  Synthetic polynucleotide
atcatctcaccttgcctcctgaaccgcaacggctcacacctgcaggtcccactaattagcgcaagatcccactaattagcgcatcgtcccactaattagcgcagactcccactaattagcgcactatcccactaattagcgcaacttcccactaattagcgcatgcggcgcgccatgcttcatcagactct

SEQ ID NO: 7135 - DNA, 191 bp, Artificial Sequence; identical to SEQ ID NO: 7134
  Synthetic polynucleotide

SEQ ID NO: 7136 - DNA, 148 bp, Artificial Sequence
  Synthetic polynucleotide
atcatctcaccttgcctcctgggcaaggtatagcctagcctgcagggcaggtgagagcaggtgtcggcaggtggacgcaggtgctagcaggtgactgcaggtgtgcgcaggtggtagcaggtgggcgcgccatgcttcatcagactct

SEQ ID NO: 7137 - DNA, 148 bp, Artificial Sequence; identical to SEQ ID NO: 7136
  Synthetic polynucleotide

SEQ ID NO: 7138 - DNA, 164 bp, Artificial Sequence
  Synthetic polynucleotide
atcatctcaccttgcctcctgccactagtagaccctttcctgcaggttcccggaaagattcccggaatcgttcccggaagacttcccggaactattcccggaaactttcccggaatgcttcccggaagtattcccggaaggcgcgccatgcttcatcagactct

SEQ ID NO: 7139 - DNA, 164 bp, Artificial Sequence; identical to SEQ ID NO: 7138
  Synthetic polynucleotide

SEQ ID NO: 7140 - DNA, 191 bp, Artificial Sequence
  Synthetic polynucleotide
atcatctcaccttgcctcctgcgtgaattgcgtccgatcctgcaggattaattttatggccgtagaattaattttatggccgttcgattaattttatggccgtgacattaattttatggccgtctaattaattttatggccgtactattaattttatggccgttgcggcgcgccatgcttcatcagactct

SEQ ID NO: 7141 - DNA, 191 bp, Artificial Sequence; identical to SEQ ID NO: 7140
  Synthetic polynucleotide

SEQ ID NO: 7142 - DNA, 156 bp, Artificial Sequence
  Synthetic polynucleotide
atcatctcaccttgcctcctgaaagatagtgccgagggcctgcaggctcacctgagactcacctgtcgctcacctggacctcacctgctactcacctgactctcacctgtgcctcacctggtactcacctgggcgcgccatgcttcatcagactct

SEQ ID NO: 7143 - DNA, 156 bp, Artificial Sequence; identical to SEQ ID NO: 7142
  Synthetic polynucleotide

SEQ ID NO: 7144 - DNA, 172 bp, Artificial Sequence
  Synthetic polynucleotide
atcatctcaccttgcctcctgcacctacttagagacttcctgcaggccaataaaaaagaccaataaaaatcgccaataaaaagacccaataaaaactaccaataaaaaactccaataaaaatgcccaataaaaagtaccaataaaaaggcgcgccatgcttcatcagactct

SEQ ID NO: 7145 - DNA, 172 bp, Artificial Sequence; identical to SEQ ID NO: 7144
  Synthetic polynucleotide

SEQ ID NO: 7146 - DNA, 172 bp, Artificial Sequence
  Synthetic polynucleotide
atcatctcaccttgcctcctgacagctagagtactccccctgcaggccaataaaacagaccaataaaactcgccaataaaacgacccaataaaacctaccaataaaacactccaataaaactgcccaataaaacgtaccaataaaacggcgcgccatgcttcatcagactct

SEQ ID NO: 7147 - DNA, 172 bp, Artificial Sequence; identical to SEQ ID NO: 7146
  Synthetic polynucleotide

SEQ ID NO: 7148 - DNA, 191 bp, Artificial Sequence
  Synthetic polynucleotide
atcatctcaccttgcctcctgacactcgaatcagcttgcctgcaggggggtggggacatggtgttcttcgtggagaggggtggggacatggtgttcttcgtggtcgggggtggggacatggtgttcttcgtgggacggggtggggacatggtgttcttcgtggctaggcgcgccatgcttcatcagactct

SEQ ID NO: 7149 - DNA, 191 bp, Artificial Sequence; identical to SEQ ID NO: 7148
  Synthetic polynucleotide

SEQ ID NO: 7150 - DNA, 200 bp, Artificial Sequence
  Synthetic polynucleotide
atcatctcaccttgcctcctggatagagcagaacagttcctgcaggggacatgcccaggcatgccagaggacatgcccaggcatgcctcgggacatgcccaggcatgccgacggacatgcccaggcatgccctaggacatgcccaggcatgccactggacatgcccaggcatgccggcgcgccatgcttcatcagactct

SEQ ID NO: 7151 - DNA, 200 bp, Artificial Sequence; identical to SEQ ID NO: 7150
  Synthetic polynucleotide

SEQ ID NO: 7152 - DNA, 164 bp, Artificial Sequence
  Synthetic polynucleotide
atcatctcaccttgcctcctgttacagcgttggcgctgcctgcaggagcaattaaagaagcaattaatcgagcaattaagacagcaattaactaagcaattaaactagcaattaatgcagcaattaagtaagcaattaaggcgcgccatgcttcatcagactct

SEQ ID NO: 7153 - DNA, 164 bp, Artificial Sequence; identical to SEQ ID NO: 7152
  Synthetic polynucleotide

SEQ ID NO: 7154 - DNA, 156 bp, Artificial Sequence
  Synthetic polynucleotide
atcatctcaccttgcctcctgggtctttggacggcacacctgcaggtgttttttagatgtttttttcgtgttttttgactgttttttctatgttttttacttgtttttttgctgttttttgtatgttttttggcgcgccatgcttcatcagactct

SEQ ID NO: 7155 - DNA, 156 bp, Artificial Sequence; identical to SEQ ID NO: 7154
  Synthetic polynucleotide

SEQ ID NO: 7156 - DNA, 191 bp, Artificial Sequence
  Synthetic polynucleotide
atcatctcaccttgcctcctgcacccttagtaagaccgcctgcaggttgaaaaccgttaatttagattgaaaaccgttaattttcgttgaaaaccgttaatttgacttgaaaaccgttaatttctattgaaaaccgttaatttactttgaaaaccgttaattttgcggcgcgccatgcttcatcagactct

SEQ ID NO: 7157 - DNA, 191 bp, Artificial Sequence; identical to SEQ ID NO: 7156
  Synthetic polynucleotide

SEQ ID NO: 7158 - DNA, 190 bp, Artificial Sequence
  Synthetic polynucleotide
atcatctcaccttgcctcctggtatacttggatacgagcctgcaggagtttcggtttcggagaagtttcggtttcggtcgagtttcggtttcgggacagtttcggtttcggctaagtttcggtttcggactagtttcggtttcggtgcagtttcggtttcgggtaggcgcgccatgcttcatcagactct

SEQ ID NO: 7159 - DNA, 190 bp, Artificial Sequence; identical to SEQ ID NO: 7158
  Synthetic polynucleotide

SEQ ID NO: 7160 - DNA, 164 bp, Artificial Sequence
  Synthetic polynucleotide
atcatctcaccttgcctcctggcgcacagtcgaatagacctgcaggttcctgcctagattcctgccttcgttcctgcctgacttcctgcctctattcctgcctactttcctgccttgcttcctgcctgtattcctgcctggcgcgccatgcttcatcagactct

SEQ ID NO: 7161 - DNA, 164 bp, Artificial Sequence; identical to SEQ ID NO: 7160
  Synthetic polynucleotide

SEQ ID NO: 7162 - DNA, 196 bp, Artificial Sequence
  Synthetic polynucleotide
atcatctcaccttgcctcctgccgcgagtttgcagaatcctgcaggctgttacgtaatcagactgttacgtaatctcgctgttacgtaatcgacctgttacgtaatcctactgttacgtaatcactctgttacgtaatctgcctgttacgtaatcgtactgttacgtaatcggcgcgccatgcttcatcagactct

SEQ ID NO: 7163 - DNA, 196 bp, Artificial Sequence; identical to SEQ ID NO: 7162
  Synthetic polynucleotide

SEQ ID NO: 7164 - DNA, 180 bp, Artificial Sequence
  Synthetic polynucleotide
atcatctcaccttgcctcctgccgctgtccgaattgatcctgcaggaaacatgtactagaaaacatgtacttcgaaacatgtactgacaaacatgtactctaaaacatgtactactaaacatgtacttgcaaacatgtactgtaaaacatgtactggcgcgccatgcttcatcagactct

SEQ ID NO: 7165 - DNA, 180 bp, Artificial Sequence; identical to SEQ ID NO: 7164
  Synthetic polynucleotide

SEQ ID NO: 7166 - DNA, 197 bp, Artificial Sequence
  Synthetic polynucleotide
atcatctcaccttgcctcctgctgccgcatacggtgaacctgcagggaatatgcaaatcagagagaatatgcaaatcagtcggaatatgcaaatcaggacgaatatgcaaatcagctagaatatgcaaatcagactgaatatgcaaatcagtgcgaatatgcaaatcaggtaggcgcgccatgcttcatcagactct

SEQ ID NO: 7167 - DNA, 197 bp, Artificial Sequence; identical to SEQ ID NO: 7166
  Synthetic polynucleotide

SEQ ID NO: 7168 - DNA, 188 bp, Artificial Sequence
  Synthetic polynucleotide
atcatctcaccttgcctcctgtgcaggaaccttcattccctgcagggccgccattttgagagccgccattttgtcggccgccattttggacgccgccattttgctagccgccattttgactgccgccattttgtgcgccgccattttggtagccgccattttgggcgcgccatgcttcatcagactct

SEQ ID NO: 7169 - DNA, 188 bp, Artificial Sequence; identical to SEQ ID NO: 7168
  Synthetic polynucleotide

SEQ ID NO: 7170 - DNA, 180 bp, Artificial Sequence
  Synthetic polynucleotide
atcatctcaccttgcctcctgtttcaggcttcctagcccctgcaggttcaaggtcaaagattcaaggtcaatcgttcaaggtcaagacttcaaggtcaactattcaaggtcaaactttcaaggtcaatgcttcaaggtcaagtattcaaggtcaaggcgcgccatgcttcatcagactct

SEQ ID NO: 7171 - DNA, 180 bp, Artificial Sequence; identical to SEQ ID NO: 7170
  Synthetic polynucleotide

SEQ ID NO: 7172 - DNA, 172 bp, Artificial Sequence
  Synthetic polynucleotide
atcatctcaccttgcctcctgtccggaatcaagtggtgcctgcaggaaatcacggcagaaaatcacggctcgaaatcacggcgacaaatcacggcctaaaatcacggcactaaatcacggctgcaaatcacggcgtaaaatcacggcggcgcgccatgcttcatcagactct

SEQ ID NO: 7173 - DNA, 172 bp, Artificial Sequence; identical to SEQ ID NO: 7172
  Synthetic polynucleotide

SEQ ID NO: 7174 - DNA, 196 bp, Artificial Sequence
  Synthetic polynucleotide
atcatctcaccttgcctcctggtttctttcgatttggccctgcaggctaatctaattaaagactaatctaattaatcgctaatctaattaagacctaatctaattaactactaatctaattaaactctaatctaattaatgcctaatctaattaagtactaatctaattaaggcgcgccatgcttcatcagactct

SEQ ID NO: 7175 - DNA, 196 bp, Artificial Sequence; identical to SEQ ID NO: 7174
  Synthetic polynucleotide

SEQ ID NO: 7176 - DNA, 172 bp, Artificial Sequence
  Synthetic polynucleotide
atcatctcaccttgcctcctggcacgggacctaaatgacctgcaggcgcgccaaacagacgcgccaaactcgcgcgccaaacgaccgcgccaaacctacgcgccaaacactcgcgccaaactgccgcgccaaacgtacgcgccaaacggcgcgccatgcttcatcagactct

SEQ ID NO: 7177 - DNA, 172 bp, Artificial Sequence; identical to SEQ ID NO: 7176
  Synthetic polynucleotide

SEQ ID NO: 7178 - DNA, 197 bp, Artificial Sequence
  Synthetic polynucleotide
atcatctcaccttgcctcctggagtgggtttcggaactcctgcaggaaaggtcaccagaggtcaagaaaaggtcaccagaggtcatcgaaaggtcaccagaggtcagacaaaggtcaccagaggtcactaaaaggtcaccagaggtcaactaaaggtcaccagaggtcatgcggcgcgccatgcttcatcagactct

SEQ ID NO: 7179 - DNA, 197 bp, Artificial Sequence; identical to SEQ ID NO: 7178
  Synthetic polynucleotide

SEQ ID NO: 7180 - DNA, 185 bp, Artificial Sequence
  Synthetic polynucleotide
atcatctcaccttgcctcctggctgttgactcccttagcctgcaggaagcacctgtcaatatagaaagcacctgtcaatattcgaagcacctgtcaatatgacaagcacctgtcaatatctaaagcacctgtcaatatactaagcacctgtcaatattgcggcgcgccatgcttcatcagactct

SEQ ID NO: 7181 - DNA, 185 bp, Artificial Sequence; identical to SEQ ID NO: 7180
  Synthetic polynucleotide

SEQ ID NO: 7182 - DNA, 180 bp, Artificial Sequence
  Synthetic polynucleotide
atcatctcaccttgcctcctgattaccctgtcatagtgcctgcaggggccaatccccagaggccaatcccctcgggccaatccccgacggccaatccccctaggccaatccccactggccaatcccctgcggccaatccccgtaggccaatccccggcgcgccatgcttcatcagactct

SEQ ID NO: 7183 - DNA, 180 bp, Artificial Sequence; identical to SEQ ID NO: 7182
  Synthetic polynucleotide

SEQ ID NO: 7184 - DNA, 164 bp, Artificial Sequence
  Synthetic polynucleotide
atcatctcaccttgcctcctgcaacattaatctcacaccctgcaggccttatctgagaccttatctgtcgccttatctggacccttatctgctaccttatctgactccttatctgtgcccttatctggtaccttatctgggcgcgccatgcttcatcagactct

SEQ ID NO: 7185 - DNA, 164 bp, Artificial Sequence; identical to SEQ ID NO: 7184
  Synthetic polynucleotide

SEQ ID NO: 7186 - DNA, 156 bp, Artificial Sequence
  Synthetic polynucleotide
atcatctcaccttgcctcctggacagacacgtcgccaacctgcaggcacatcaaagacacatcaatcgcacatcaagaccacatcaactacacatcaaactcacatcaatgccacatcaagtacacatcaaggcgcgccatgcttcatcagactct

SEQ ID NO: 7187 - DNA, 156 bp, Artificial Sequence; identical to SEQ ID NO: 7186
  Synthetic polynucleotide

SEQ ID NO: 7188 - DNA, 190 bp, Artificial Sequence
  Synthetic polynucleotide
atcatctcaccttgcctcctggagcattaatagaccaccctgcaggagtttcggtttcgtagaagtttcggtttcgttcgagtttcggtttcgtgacagtttcggtttcgtctaagtttcggtttcgtactagtttcggtttcgttgcagtttcggtttcgtgtaggcgcgccatgcttcatcagactct

SEQ ID NO: 7189 - DNA, 190 bp, Artificial Sequence; identical to SEQ ID NO: 7188
  Synthetic polynucleotide

SEQ ID NO: 7190 - DNA, 188 bp, Artificial Sequence
  Synthetic polynucleotide
atcatctcaccttgcctcctgtttggtgggcggaaagtcctgcagggcgggggcggcgagagcgggggcggcgtcggcgggggcggcggacgcgggggcggcgctagcgggggcggcgactgcgggggcggcgtgcgcgggggcggcggtagcgggggcggcgggcgcgccatgcttcatcagactct

SEQ ID NO: 7191 - DNA, 188 bp, Artificial Sequence; identical to SEQ ID NO: 7190
  Synthetic polynucleotide

SEQ ID NO: 7192 - DNA, 172 bp, Artificial Sequence
  Synthetic polynucleotide
atcatctcaccttgcctcctgttcgaaattactggtagcctgcaggggcggcggcgagaggcggcggcgtcgggcggcggcggacggcggcggcgctaggcggcggcgactggcggcggcgtgcggcggcggcggtaggcggcggcgggcgcgccatgcttcatcagactct

SEQ ID NO: 7193 - DNA, 172 bp, Artificial Sequence; identical to SEQ ID NO: 7192
  Synthetic polynucleotide

SEQ ID NO: 7194 - DNA, 156 bp, Artificial Sequence
  Synthetic polynucleotide
atcatctcaccttgcctcctgacttgtcagcccaggatcctgcaggagtcagctagaagtcagcttcgagtcagctgacagtcagctctaagtcagctactagtcagcttgcagtcagctgtaagtcagctggcgcgccatgcttcatcagactct

SEQ ID NO: 7195 - DNA, 156 bp, Artificial Sequence; identical to SEQ ID NO: 7194
  Synthetic polynucleotide

SEQ ID NO: 7196 - DNA, 156 bp, Artificial Sequence
  Synthetic polynucleotide
atcatctcaccttgcctcctgatagtgccacaacgcctcctgcaggtgataaggagatgataaggtcgtgataagggactgataaggctatgataaggacttgataaggtgctgataagggtatgataaggggcgcgccatgcttcatcagactct

SEQ ID NO: 7197 - DNA, 156 bp, Artificial Sequence; identical to SEQ ID NO: 7196
  Synthetic polynucleotide

SEQ ID NO: 7198 - DNA, 172 bp, Artificial Sequence
  Synthetic polynucleotide
atcatctcaccttgcctcctgcaagcactagggttgcccctgcaggcgtcagctggagacgtcagctggtcgcgtcagctgggaccgtcagctggctacgtcagctggactcgtcagctggtgccgtcagctgggtacgtcagctggggcgcgccatgcttcatcagactct

SEQ ID NO: 7199 - DNA, 172 bp, Artificial Sequence; identical to SEQ ID NO: 7198
  Synthetic polynucleotide

SEQ ID NO: 7200 - DNA, 164 bp, Artificial Sequence
  Synthetic polynucleotide
atcatctcaccttgcctcctgttatagtggcctgcattcctgcaggtttattaccagatttattacctcgtttattaccgactttattaccctatttattaccacttttattacctgctttattaccgtatttattaccggcgcgccatgcttcatcagactct

SEQ ID NO: 7201 - DNA, 164 bp, Artificial Sequence; identical to SEQ ID NO: 7200
  Synthetic polynucleotide

SEQ ID NO: 7202 - DNA, 180 bp, Artificial Sequence
  Synthetic polynucleotide
atcatctcaccttgcctcctggtcatcagttgagctggcctgcaggattgtgcaataagaattgtgcaatatcgattgtgcaatagacattgtgcaatactaattgtgcaataactattgtgcaatatgcattgtgcaatagtaattgtgcaataggcgcgccatgcttcatcagactct

SEQ ID NO: 7203 - DNA, 180 bp, Artificial Sequence; identical to SEQ ID NO: 7202
  Synthetic polynucleotide

SEQ ID NO: 7204 - DNA, 185 bp, Artificial Sequence
  Synthetic polynucleotide
atcatctcaccttgcctcctggatactcccgtggctatcctgcaggggcggggaaattccccagaggcggggaaattcccctcgggcggggaaattccccgacggcggggaaattccccctaggcggggaaattccccactggcggggaaattcccctgcggcgcgccatgcttcatcagactct

SEQ ID NO: 7205 - DNA, 185 bp, Artificial Sequence; identical to SEQ ID NO: 7204
  Synthetic polynucleotide

SEQ ID NO: 7206 - DNA, 197 bp, Artificial Sequence
  Synthetic polynucleotide
atcatctcaccttgcctcctgcttcacgcgtaaacattcctgcaggaaaaattgctgactcagcagaaaaaattgctgactcagctcgaaaaattgctgactcagcgacaaaaattgctgactcagcctaaaaaattgctgactcagcactaaaaattgctgactcagctgcggcgcgccatgcttcatcagactct

SEQ ID NO: 7207 - DNA, 197 bp, Artificial Sequence; identical to SEQ ID NO: 7206
  Synthetic polynucleotide

SEQ ID NO: 7208 - DNA, 156 bp, Artificial Sequence
  Synthetic polynucleotide
atcatctcaccttgcctcctgcaggttatctgtattgacctgcaggtgataagaagatgataagatcgtgataagagactgataagactatgataagaacttgataagatgctgataagagtatgataagaggcgcgccatgcttcatcagactct

SEQ ID NO: 7209 - DNA, 156 bp, Artificial Sequence; identical to SEQ ID NO: 7208
  Synthetic polynucleotide

SEQ ID NO: 7210 - DNA, 156 bp, Artificial Sequence
  Synthetic polynucleotide
atcatctcaccttgcctcctgggaatggaggccgtctacctgcaggaatcaaaaagaaatcaaaatcgaatcaaaagacaatcaaaactaaatcaaaaactaatcaaaatgcaatcaaaagtaaatcaaaaggcgcgccatgcttcatcagactct

SEQ ID NO: 7211 - DNA, 156 bp, Artificial Sequence; identical to SEQ ID NO: 7210
  Synthetic polynucleotide

SEQ ID NO: 7212 - DNA, 191 bp, Artificial Sequence
  Synthetic polynucleotide
atcatctcaccttgcctcctgcgccgatattgatggcccctgcaggggcggggaggtgggggcagaggcggggaggtgggggctcgggcggggaggtgggggcgacggcggggaggtgggggcctaggcggggaggtgggggcactggcggggaggtgggggctgcggcgcgccatgcttcatcagactct

SEQ ID NO: 7213 - DNA, 191 bp, Artificial Sequence; identical to SEQ ID NO: 7212
  Synthetic polynucleotide

SEQ ID NO: 7214 - DNA, 188 bp, Artificial Sequence
  Synthetic polynucleotide
atcatctcaccttgcctcctgatcctgcgttgatgacccctgcaggcgtgtggggaaaagacgtgtggggaaatcgcgtgtggggaaagaccgtgtggggaaactacgtgtggggaaaactcgtgtggggaaatgccgtgtggggaaagtacgtgtggggaaaggcgcgccatgcttcatcagactct

SEQ ID NO: 7215 - DNA, 188 bp, Artificial Sequence; identical to SEQ ID NO: 7214
  Synthetic polynucleotide

SEQ ID NO: 7216 - DNA, 140 bp, Artificial Sequence
  Synthetic polynucleotide
atcatctcaccttgcctcctggacgccaaacctacgctcctgcagggatggcagagatggctcggatggcgacgatggcctagatggcactgatggctgcgatggcgtagatggcggcgcgccatgcttcatcagactct

SEQ ID NO: 7217 - DNA, 140 bp, Artificial Sequence; identical to SEQ ID NO: 7216
  Synthetic polynucleotide

SEQ ID NO: 7218 - DNA, 200 bp, Artificial Sequence
  Synthetic polynucleotide
atcatctcaccttgcctcctgcagtcagatagagcctccctgcagggaaaaatttccaatactccactccccccccagagaaaaatttccaatactccactcccccccctcggaaaaatttccaatactccactccccccccgacgaaaaatttccaatactccactccccccccggcgcgccatgcttcatcagactct

SEQ ID NO: 7219 - DNA, 200 bp, Artificial Sequence; identical to SEQ ID NO: 7218
  Synthetic polynucleotide

SEQ ID NO: 7220 - DNA, 172 bp, Artificial Sequence
  Synthetic polynucleotide
atcatctcaccttgcctcctgtactgacgctcagctggcctgcaggcctccgccgcagacctccgccgctcgcctccgccgcgaccctccgccgcctacctccgccgcactcctccgccgctgccctccgccgcgtacctccgccgcggcgcgccatgcttcatcagactct

SEQ ID NO: 7221 - DNA, 172 bp, Artificial Sequence; identical to SEQ ID NO: 7220
  Synthetic polynucleotide

SEQ ID NO: 7222 - DNA, 180 bp, Artificial Sequence
  Synthetic polynucleotide
atcatctcaccttgcctcctgggaaacgatagtacaaccctgcaggattgtgcaatcagaattgtgcaatctcgattgtgcaatcgacattgtgcaatcctaattgtgcaatcactattgtgcaatctgcattgtgcaatcgtaattgtgcaatcggcgcgccatgcttcatcagactct

SEQ ID NO: 7223 - DNA, 180 bp, Artificial Sequence; identical to SEQ ID NO: 7222
  Synthetic polynucleotide

SEQ ID NO: 7224 - DNA, 185 bp, Artificial Sequence
  Synthetic polynucleotide
atcatctcaccttgcctcctgttaccttgagatcccggcctgcaggtttaattataattaagagatttaattataattaagtcgtttaattataattaaggactttaattataattaagctatttaattataattaagacttttaattataattaagtgcggcgcgccatgcttcatcagactct

SEQ ID NO: 7225 - DNA, 185 bp, Artificial Sequence; identical to SEQ ID NO: 7224
  Synthetic polynucleotide

SEQ ID NO: 7226 - DNA, 190 bp, Artificial Sequence
  Synthetic polynucleotide
atcatctcaccttgcctcctgcgatccgattcacgcgacctgcaggtgcatgtcattttgagatgcatgtcattttgtcgtgcatgtcattttggactgcatgtcattttgctatgcatgtcattttgacttgcatgtcattttgtgctgcatgtcattttggtaggcgcgccatgcttcatcagactct

SEQ ID NO: 7227 - DNA, 190 bp, Artificial Sequence; identical to SEQ ID NO: 7226
  Synthetic polynucleotide

SEQ ID NO: 7228 - DNA, 180 bp, Artificial Sequence
  Synthetic polynucleotide
atcatctcaccttgcctcctgctgggaagacaacaggacctgcaggccacgtgatccagaccacgtgatcctcgccacgtgatccgacccacgtgatccctaccacgtgatccactccacgtgatcctgcccacgtgatccgtaccacgtgatccggcgcgccatgcttcatcagactct

SEQ ID NO: 7229 - DNA, 180 bp, Artificial Sequence; identical to SEQ ID NO: 7228
  Synthetic polynucleotide

SEQ ID NO: 7230 - DNA, 190 bp, Artificial Sequence
  Synthetic polynucleotide
atcatctcaccttgcctcctgtcaagcgataattgggacctgcagggcagctgtccgaggagagcagctgtccgaggtcggcagctgtccgagggacgcagctgtccgaggctagcagctgtccgaggactgcagctgtccgaggtgcgcagctgtccgagggtaggcgcgccatgcttcatcagactct

SEQ ID NO: 7231 - DNA, 190 bp, Artificial Sequence; identical to SEQ ID NO: 7230
  Synthetic polynucleotide

SEQ ID NO: 7232 - DNA, 164 bp, Artificial Sequence
  Synthetic polynucleotide
atcatctcaccttgcctcctgtgcacacggcgtgatcacctgcaggccacgtggtagaccacgtggttcgccacgtggtgacccacgtggtctaccacgtggtactccacgtggttgcccacgtggtgtaccacgtggtggcgcgccatgcttcatcagactct

SEQ ID NO: 7233 - DNA, 164 bp, Artificial Sequence; identical to SEQ ID NO: 7232
  Synthetic polynucleotide

SEQ ID NO: 7234 - DNA, 197 bp, Artificial Sequence
  Synthetic polynucleotide
atcatctcaccttgcctcctggctacgtagtcgagatgcctgcaggaaccacctgttgaccagaaaccacctgttgacctcgaaccacctgttgaccgacaaccacctgttgaccctaaaccacctgttgaccactaaccacctgttgacctgcaaccacctgttgaccgtaggcgcgccatgcttcatcagactct

SEQ ID NO: 7235 - DNA, 197 bp, Artificial Sequence; identical to SEQ ID NO: 7234
  Synthetic polynucleotide

SEQ ID NO: 7236 - DNA, 188 bp, Artificial Sequence
  Synthetic polynucleotide
atcatctcaccttgcctcctggataatgagggccgtatcctgcagggcgcagctgcgtagagcgcagctgcgttcggcgcagctgcgtgacgcgcagctgcgtctagcgcagctgcgtactgcgcagctgcgttgcgcgcagctgcgtgtagcgcagctgcgtggcgcgccatgcttcatcagactct

SEQ ID NO: 7237 - DNA, 188 bp, Artificial Sequence; identical to SEQ ID NO: 7236
  Synthetic polynucleotide

SEQ ID NO: 7238 - DNA, 185 bp, Artificial Sequence
  Synthetic polynucleotide
atcatctcaccttgcctcctgcaatgcacttgtgatatcctgcagggtagtaattaatgcaaagagtagtaattaatgcaatcggtagtaattaatgcaagacgtagtaattaatgcaactagtagtaattaatgcaaactgtagtaattaatgcaatgcggcgcgccatgcttcatcagactct

SEQ ID NO: 7239 - DNA, 185 bp, Artificial Sequence; identical to SEQ ID NO: 7238
  Synthetic polynucleotide

SEQ ID NO: 7240 - DNA, 196 bp, Artificial Sequence
  Synthetic polynucleotide
atcatctcaccttgcctcctgataacagcgggttcggccctgcaggtatttggtaaggcagatatttggtaaggctcgtatttggtaaggcgactatttggtaaggcctatatttggtaaggcacttatttggtaaggctgctatttggtaaggcgtatatttggtaaggcggcgcgccatgcttcatcagactct

SEQ ID NO: 7241 - DNA, 196 bp, Artificial Sequence; identical to SEQ ID NO: 7240
  Synthetic polynucleotide

SEQ ID NO: 7242 - DNA, 191 bp, Artificial Sequence
  Synthetic polynucleotide
atcatctcaccttgcctcctgggtagctaacttacaagcctgcaggggtcgcgcacgcatgaccgccagaggtcgcgcacgcatgaccgcctcgggtcgcgcacgcatgaccgccgacggtcgcgcacgcatgaccgccctaggtcgcgcacgcatgaccgccactggcgcgccatgcttcatcagactct

SEQ ID NO: 7243 - DNA, 191 bp, Artificial Sequence; identical to SEQ ID NO: 7242
  Synthetic polynucleotide

SEQ ID NO: 7244 - DNA, 164 bp, Artificial Sequence
  Synthetic polynucleotide
atcatctcaccttgcctcctgagtgaggctgtgcctagcctgcaggcaagatggcagacaagatggctcgcaagatggcgaccaagatggcctacaagatggcactcaagatggctgccaagatggcgtacaagatggcggcgcgccatgcttcatcagactct

SEQ ID NO: 7245 - DNA, 164 bp, Artificial Sequence; identical to SEQ ID NO: 7244
  Synthetic polynucleotide

SEQ ID NO: 7246 - DNA, 172 bp, Artificial Sequence
  Synthetic polynucleotide
atcatctcaccttgcctcctgaacaaggaaatcctggtcctgcaggattacatgatagaattacatgattcgattacatgatgacattacatgatctaattacatgatactattacatgattgcattacatgatgtaattacatgatggcgcgccatgcttcatcagactct

SEQ ID NO: 7247 - DNA, 172 bp, Artificial Sequence; identical to SEQ ID NO: 7246
  Synthetic polynucleotide

SEQ ID NO: 7248 - DNA, 196 bp, Artificial Sequence
  Synthetic polynucleotide
atcatctcaccttgcctcctgactctaataggtccgtccctgcaggtctgtttgtttatagatctgtttgtttattcgtctgtttgtttatgactctgtttgtttatctatctgtttgtttatacttctgtttgtttattgctctgtttgtttatgtatctgtttgtttatggcgcgccatgcttcatcagactct

SEQ ID NO: 7249 - DNA, 196 bp, Artificial Sequence; identical to SEQ ID NO: 7248
  Synthetic polynucleotide

SEQ ID NO: 7250 - DNA, 191 bp, Artificial Sequence
  Synthetic polynucleotide
atcatctcaccttgcctcctgctagttccgtgatcctccctgcaggctaatcgttttccgattagcgagactaatcgttttccgattagcgtcgctaatcgttttccgattagcggacctaatcgttttccgattagcgctactaatcgttttccgattagcgactggcgcgccatgcttcatcagactct

SEQ ID NO: 7251 - DNA, 191 bp, Artificial Sequence; identical to SEQ ID NO: 7250
  Synthetic polynucleotide

SEQ ID NO: 7252 - DNA, 186 bp, Artificial Sequence
  Synthetic polynucleotide
atcatctcaccttgcctcctgcggtcggagattcggttcctgcaggaccgggtcacgtgcagaagcagaaccgggtcacgtgcagaagctcgaccgggtcacgtgcagaagcgacaccgggtcacgtgcagaagcctaaccgggtcacgtgcagaagcactggcgcgccatgcttcatcagactct

SEQ ID NO: 7253 - DNA, 186 bp, Artificial Sequence; identical to SEQ ID NO: 7252
  Synthetic polynucleotide

SEQ ID NO: 7254 - DNA, 197 bp, Artificial Sequence
  Synthetic polynucleotide
atcatctcaccttgcctcctggagaacacatagcgatacctgcaggatcgcctcaggcaatagaatcgcctcaggcaattcgatcgcctcaggcaatgacatcgcctcaggcaatctaatcgcctcaggcaatactatcgcctcaggcaattgcatcgcctcaggcaatgtaggcgcgccatgcttcatcagactct

SEQ ID NO: 7255 - DNA, 197 bp, Artificial Sequence; identical to SEQ ID NO: 7254
  Synthetic polynucleotide

SEQ ID NO: 7256 - DNA, 191 bp, Artificial Sequence
  Synthetic polynucleotide
atcatctcaccttgcctcctgcatttctgcagcggttgcctgcaggacggccataaaattaatagaacggccataaaattaattcgacggccataaaattaatgacacggccataaaattaatctaacggccataaaattaatactacggccataaaattaattgcggcgcgccatgcttcatcagactct

SEQ ID NO: 7257 - DNA, 191 bp, Artificial Sequence; identical to SEQ ID NO: 7256
  Synthetic polynucleotide

SEQ ID NO: 7258 - DNA, 191 bp, Artificial Sequence
  Synthetic polynucleotide
atcatctcaccttgcctcctgttcaaggctgacctaatcctgcaggatagtgagcactgttcgagaatagtgagcactgttcgtcgatagtgagcactgttcggacatagtgagcactgttcgctaatagtgagcactgttcgactatagtgagcactgttcgtgcggcgcgccatgcttcatcagactct

SEQ ID NO: 7259 - DNA, 191 bp, Artificial Sequence; identical to SEQ ID NO: 7258
  Synthetic polynucleotide

SEQ ID NO: 7260 - DNA, 164 bp, Artificial Sequence
  Synthetic polynucleotide
atcatctcaccttgcctcctggatggttactccctagccctgcaggtcaaggtcaagatcaaggtcatcgtcaaggtcagactcaaggtcactatcaaggtcaacttcaaggtcatgctcaaggtcagtatcaaggtcaggcgcgccatgcttcatcagactct

SEQ ID NO: 7261 - DNA, 164 bp, Artificial Sequence; identical to SEQ ID NO: 7260
  Synthetic polynucleotide

SEQ ID NO: 7262 - DNA, 191 bp, Artificial Sequence
  Synthetic polynucleotide
atcatctcaccttgcctcctgatccctacaacgtgagccctgcagggaaatttaatccctctaagagaaatttaatccctctatcggaaatttaatccctctagacgaaatttaatccctctactagaaatttaatccctctaactgaaatttaatccctctatgcggcgcgccatgcttcatcagactct

SEQ ID NO: 7263 - DNA, 191 bp, Artificial Sequence; identical to SEQ ID NO: 7262
  Synthetic polynucleotide

SEQ ID NO: 7264 - DNA, 197 bp, Artificial Sequence
  Synthetic polynucleotide
atcatctcaccttgcctcctgtcgagaagctatacagccctgcaggaggtgttctgttaacactagaaggtgttctgttaacacttcgaggtgttctgttaacactgacaggtgttctgttaacactctaaggtgttctgttaacactactaggtgttctgttaacacttgcggcgcgccatgcttcatcagactct

SEQ ID NO: 7265 - DNA, 197 bp, Artificial Sequence; identical to SEQ ID NO: 7264
  Synthetic polynucleotide

SEQ ID NO: 7266 - DNA, 180 bp, Artificial Sequence
  Synthetic polynucleotide
atcatctcaccttgcctcctggagctatggtcttgaagcctgcaggctgggtagagcagactgggtagagctcgctgggtagagcgacctgggtagagcctactgggtagagcactctgggtagagctgcctgggtagagcgtactgggtagagcggcgcgccatgcttcatcagactct

SEQ ID NO: 7267 - DNA, 180 bp, Artificial Sequence; identical to SEQ ID NO: 7266
  Synthetic polynucleotide

SEQ ID NO: 7268 - DNA, 200 bp, Artificial Sequence
  Synthetic polynucleotide
atcatctcaccttgcctcctgccagctgccagttgtgtcctgcagggtgaccttaataaggtcacagagtgaccttaataaggtcactcggtgaccttaataaggtcacgacgtgaccttaataaggtcacctagtgaccttaataaggtcacactgtgaccttaataaggtcacggcgcgccatgcttcatcagactct

SEQ ID NO: 7269 - DNA, 200 bp, Artificial Sequence; identical to SEQ ID NO: 7268
  Synthetic polynucleotide

SEQ ID NO: 7270 - DNA, 172 bp, Artificial Sequence
  Synthetic polynucleotide
atcatctcaccttgcctcctgatgcagctgtgaacccacctgcaggattttacgacagaattttacgactcgattttacgacgacattttacgacctaattttacgacactattttacgactgcattttacgacgtaattttacgacggcgcgccatgcttcatcagactct

SEQ ID NO: 7271 - DNA, 172 bp, Artificial Sequence; identical to SEQ ID NO: 7270
  Synthetic polynucleotide

SEQ ID NO: 7272 - DNA, 172 bp, Artificial Sequence
  Synthetic polynucleotide
atcatctcaccttgcctcctgttcggagagcttagaggcctgcagggttgccagggagagttgccagggtcggttgccaggggacgttgccagggctagttgccagggactgttgccagggtgcgttgccaggggtagttgccagggggcgcgccatgcttcatcagactct

SEQ ID NO: 7273 - DNA, 172 bp, Artificial Sequence; identical to SEQ ID NO: 7272
  Synthetic polynucleotide

SEQ ID NO: 7274 - DNA, 172 bp, Artificial Sequence
  Synthetic polynucleotide
atcatctcaccttgcctcctgcccaacgtaatagacctcctgcaggagcacctgtcagaagcacctgtctcgagcacctgtcgacagcacctgtcctaagcacctgtcactagcacctgtctgcagcacctgtcgtaagcacctgtcggcgcgccatgcttcatcagactct

SEQ ID NO: 7275 - DNA, 172 bp, Artificial Sequence; identical to SEQ ID NO: 7274
  Synthetic polynucleotide

SEQ ID NO: 7276 - DNA, 156 bp, Artificial Sequence
  Synthetic polynucleotide
atcatctcaccttgcctcctgttcacccgtgcgtccaacctgcaggtcacacctagatcacaccttcgtcacacctgactcacacctctatcacacctacttcacaccttgctcacacctgtatcacacctggcgcgccatgcttcatcagactct

SEQ ID NO: 7277 - DNA, 156 bp, Artificial Sequence; identical to SEQ ID NO: 7276
  Synthetic polynucleotide

SEQ ID NO: 7278 - DNA, 180 bp, Artificial Sequence
  Synthetic polynucleotide
atcatctcaccttgcctcctggcacttgacagattctccctgcaggtatgtaaatatagatatgtaaatattcgtatgtaaatatgactatgtaaatatctatatgtaaatatacttatgtaaatattgctatgtaaatatgtatatgtaaatatggcgcgccatgcttcatcagactct

SEQ ID NO: 7279 - DNA, 180 bp, Artificial Sequence; identical to SEQ ID NO: 7278
  Synthetic polynucleotide

SEQ ID NO: 7280 - DNA, 140 bp, Artificial Sequence
  Synthetic polynucleotide
atcatctcaccttgcctcctgggtatccatctcggatccctgcaggcaggtgagacaggtgtcgcaggtggaccaggtgctacaggtgactcaggtgtgccaggtggtacaggtgggcgcgccatgcttcatcagactct

SEQ ID NO: 7281 - DNA, 140 bp, Artificial Sequence; identical to SEQ ID NO: 7280
  Synthetic polynucleotide

SEQ ID NO: 7282 - DNA, 197 bp, Artificial Sequence
  Synthetic polynucleotide
atcatctcaccttgcctcctgaagtttcagggcccacccctgcagggcgccagctgctggcagagcgccagctgctggctcggcgccagctgctggcgacgcgccagctgctggcctagcgccagctgctggcactgcgccagctgctggctgcgcgccagctgctggcgtaggcgcgccatgcttcatcagactct

SEQ ID NO: 7283 - DNA, 197 bp, Artificial Sequence; identical to SEQ ID NO: 7282
  Synthetic polynucleotide

SEQ ID NO: 7284 - DNA, 186 bp, Artificial Sequence
  Synthetic polynucleotide
atcatctcaccttgcctcctgaatctcaatcaagcttccctgcaggtcacaccttagaaggtgtgaagatcacaccttagaaggtgtgatcgtcacaccttagaaggtgtgagactcacaccttagaaggtgtgactatcacaccttagaaggtgtgaactggcgcgccatgcttcatcagactct

SEQ ID NO: 7285 - DNA, 186 bp, Artificial Sequence; identical to SEQ ID NO: 7284
  Synthetic polynucleotide

SEQ ID NO: 7286 - DNA, 188 bp, Artificial Sequence
  Synthetic polynucleotide
atcatctcaccttgcctcctgcaatacagaggtaagatcctgcaggtttgcagccctaagatttgcagccctatcgtttgcagccctagactttgcagccctactatttgcagccctaacttttgcagccctatgctttgcagccctagtatttgcagccctaggcgcgccatgcttcatcagactct

SEQ ID NO: 7287 - DNA, 188 bp, Artificial Sequence; identical to SEQ ID NO: 7286
  Synthetic polynucleotide

SEQ ID NO: 7288 - DNA, 164 bp, Artificial Sequence
  Synthetic polynucleotide
atcatctcaccttgcctcctgattagtagtatcgtggacctgcaggcttaattgaagacttaattgatcgcttaattgagaccttaattgactacttaattgaactcttaattgatgccttaattgagtacttaattgaggcgcgccatgcttcatcagactct

SEQ ID NO: 7289 - DNA, 164 bp, Artificial Sequence; identical to SEQ ID NO: 7288
  Synthetic polynucleotide

SEQ ID NO: 7290 - DNA, 191 bp, Artificial Sequence
  Synthetic polynucleotide
atcatctcaccttgcctcctgtgaaagcgatataaccacctgcaggggcgctgtccgtggtgctgaaagaggcgctgtccgtggtgctgaatcgggcgctgtccgtggtgctgaagacggcgctgtccgtggtgctgaactaggcgctgtccgtggtgctgaaactggcgcgccatgcttcatcagactct

SEQ ID NO: 7291 - DNA, 191 bp, Artificial Sequence; identical to SEQ ID NO: 7290
  Synthetic polynucleotide

SEQ ID NO: 7292 - DNA, 197 bp, Artificial Sequence
  Synthetic polynucleotide
atcatctcaccttgcctcctgaaccaaagagtttcacgcctgcaggtttgcataacaaaggagatttgcataacaaaggtcgtttgcataacaaagggactttgcataacaaaggctatttgcataacaaaggacttttgcataacaaaggtgctttgcataacaaagggtaggcgcgccatgcttcatcagactct

SEQ ID NO: 7293 - DNA, 197 bp, Artificial Sequence; identical to SEQ ID NO: 7292
  Synthetic polynucleotide

SEQ ID NO: 7294 - DNA, 156 bp, Artificial Sequence
  Synthetic polynucleotide
atcatctcaccttgcctcctggtcgttgagcatcttatcctgcaggatatcaaaagaatatcaaatcgatatcaaagacatatcaaactaatatcaaaactatatcaaatgcatatcaaagtaatatcaaaggcgcgccatgcttcatcagactct

SEQ ID NO: 7295 - DNA, 156 bp, Artificial Sequence; identical to SEQ ID NO: 7294
  Synthetic polynucleotide

SEQ ID NO: 7296 - DNA, 190 bp, Artificial Sequence
  Synthetic polynucleotide
atcatctcaccttgcctcctgaaggtttaacgggagcccctgcaggtcgtaaaactgtcaagatcgtaaaactgtcatcgtcgtaaaactgtcagactcgtaaaactgtcactatcgtaaaactgtcaacttcgtaaaactgtcatgctcgtaaaactgtcagtaggcgcgccatgcttcatcagactct

SEQ ID NO: 7297 - DNA, 190 bp, Artificial Sequence; identical to SEQ ID NO: 7296
  Synthetic polynucleotide

SEQ ID NO: 7298 - DNA, 190 bp, Artificial Sequence
  Synthetic polynucleotide
atcatctcaccttgcctcctggaccctttcgcattgcacctgcaggcgccccctggtggcagacgccccctggtggctcgcgccccctggtggcgaccgccccctggtggcctacgccccctggtggcactcgccccctggtggctgccgccccctggtggcgtaggcgcgccatgcttcatcagactct

SEQ ID NO: 7299 - DNA, 190 bp, Artificial Sequence; identical to SEQ ID NO: 7298
  Synthetic polynucleotide

SEQ ID NO: 7300 - DNA, 196 bp, Artificial Sequence
  Synthetic polynucleotide
atcatctcaccttgcctcctgatttcggcatgcggtaccctgcaggcacaactccccagggaggttgtagacacaactccccagggaggttgttcgcacaactccccagggaggttgtgaccacaactccccagggaggttgtctacacaactccccagggaggttgtactggcgcgccatgcttcatcagactct

SEQ ID NO: 7301 - DNA, 196 bp, Artificial Sequence; identical to SEQ ID NO: 7300
  Synthetic polynucleotide

SEQ ID NO: 7302 - DNA, 148 bp, Artificial Sequence
  Synthetic polynucleotide
atcatctcaccttgcctcctggtctgagtgcactaatacctgcaggtaattgtagataattgttcgtaattgtgactaattgtctataattgtacttaattgttgctaattgtgtataattgtggcgcgccatgcttcatcagactct

SEQ ID NO: 7303 - DNA, 148 bp, Artificial Sequence; identical to SEQ ID NO: 7302
  Synthetic polynucleotide

SEQ ID NO: 7304 - DNA, 185 bp, Artificial Sequence
  Synthetic polynucleotide
atcatctcaccttgcctcctgcaagaccaacgtgggaccctgcaggaatggactttgaccccagaaatggactttgacccctcgaatggactttgaccccgacaatggactttgaccccctaaatggactttgaccccactaatggactttgacccctgcggcgcgccatgcttcatcagactct

SEQ ID NO: 7305 - DNA, 185 bp, Artificial Sequence; identical to SEQ ID NO: 7304
  Synthetic polynucleotide

SEQ ID NO: 7306 - DNA, 191 bp, Artificial Sequence
  Synthetic polynucleotide
atcatctcaccttgcctcctgctttgtttggaggatatcctgcaggttagagggattaacaatagattagagggattaacaattcgttagagggattaacaatgacttagagggattaacaatctattagagggattaacaatactttagagggattaacaattgcggcgcgccatgcttcatcagactct

SEQ ID NO: 7307 - DNA, 191 bp, Artificial Sequence; identical to SEQ ID NO: 7306
  Synthetic polynucleotide

SEQ ID NO: 7308 - DNA, 197 bp, Artificial Sequence
  Synthetic polynucleotide
atcatctcaccttgcctcctgtacggaagtgtgaacgccctgcaggttcaaatttcccgccagattcaaatttcccgcctcgttcaaatttcccgccgacttcaaatttcccgccctattcaaatttcccgccactttcaaatttcccgcctgcttcaaatttcccgccgtaggcgcgccatgcttcatcagactct

SEQ ID NO: 7309 - DNA, 197 bp, Artificial Sequence; identical to SEQ ID NO: 7308
  Synthetic polynucleotide

SEQ ID NO: 7310 - DNA, 148 bp, Artificial Sequence
  Synthetic polynucleotide
atcatctcaccttgcctcctgcggaaccaagtataatgcctgcaggttgatttagattgattttcgttgatttgacttgatttctattgatttactttgattttgcttgatttgtattgatttggcgcgccatgcttcatcagactct

SEQ ID NO: 7311 - DNA, 148 bp, Artificial Sequence; identical to SEQ ID NO: 7310
  Synthetic polynucleotide

SEQ ID NO: 7312 - DNA, 185 bp, Artificial Sequence
  Synthetic polynucleotide
atcatctcaccttgcctcctggctcccgtgctaccatacctgcaggtatttatatataaagaagatatttatatataaagatcgtatttatatataaagagactatttatatataaagactatatttatatataaagaacttatttatatataaagatgcggcgcgccatgcttcatcagactct

SEQ ID NO: 7313 - DNA, 185 bp, Artificial Sequence; identical to SEQ ID NO: 7312
  Synthetic polynucleotide

SEQ ID NO: 7314 - DNA, 164 bp, Artificial Sequence
  Synthetic polynucleotide
atcatctcaccttgcctcctgtgcagtccatagggagccctgcaggagcaggtgtagaagcaggtgttcgagcaggtgtgacagcaggtgtctaagcaggtgtactagcaggtgttgcagcaggtgtgtaagcaggtgtggcgcgccatgcttcatcagactct

SEQ ID NO: 7315 - DNA, 164 bp, Artificial Sequence; identical to SEQ ID NO: 7314
  Synthetic polynucleotide

SEQ ID NO: 7316 - DNA, 140 bp, Artificial Sequence
  Synthetic polynucleotide
atcatctcaccttgcctcctgcagcatgttacccggcacctgcaggtgaactagatgaacttcgtgaactgactgaactctatgaactacttgaacttgctgaactgtatgaactggcgcgccatgcttcatcagactct

SEQ ID NO: 7317 - DNA, 140 bp, Artificial Sequence; identical to SEQ ID NO: 7316
  Synthetic polynucleotide

SEQ ID NO: 7318 - DNA, 140 bp, Artificial Sequence
  Synthetic polynucleotide
atcatctcaccttgcctcctgcgtcgtctcccttcacacctgcagggccatcagagccatctcggccatcgacgccatcctagccatcactgccatctgcgccatcgtagccatcggcgcgccatgcttcatcagactct

SEQ ID NO: 7319 - DNA, 140 bp, Artificial Sequence; identical to SEQ ID NO: 7318
  Synthetic polynucleotide

SEQ ID NO: 7320 - DNA, 190 bp, Artificial Sequence
  Synthetic polynucleotide
atcatctcaccttgcctcctggttgcactgataaggatcctgcaggatattgcaaaatcaagaatattgcaaaatcatcgatattgcaaaatcagacatattgcaaaatcactaatattgcaaaatcaactatattgcaaaatcatgcatattgcaaaatcagtaggcgcgccatgcttcatcagactct

SEQ ID NO: 7321 - DNA, 190 bp, Artificial Sequence; identical to SEQ ID NO: 7320
  Synthetic polynucleotide

SEQ ID NO: 7322 - DNA, 148 bp, Artificial Sequence
  Synthetic polynucleotide
atcatctcaccttgcctcctgcacccgtctgttcatgtcctgcaggtaattgcagataattgctcgtaattgcgactaattgcctataattgcacttaattgctgctaattgcgtataattgcggcgcgccatgcttcatcagactct

SEQ ID NO: 7323 - DNA, 148 bp, Artificial Sequence; identical to SEQ ID NO: 7322
  Synthetic polynucleotide

SEQ ID NO: 7324 - DNA, 197 bp, Artificial Sequence
  Synthetic polynucleotide
atcatctcaccttgcctcctgttgctagagatagggatcctgcaggcttcgccacctgcttcggagacttcgccacctgcttcggtcgcttcgccacctgcttcgggaccttcgccacctgcttcggctacttcgccacctgcttcggactcttcgccacctgcttcggtgcggcgcgccatgcttcatcagactct

SEQ ID NO: 7325 - DNA, 197 bp, Artificial Sequence; identical to SEQ ID NO: 7324
  Synthetic polynucleotide

SEQ ID NO: 7326 - DNA, 180 bp, Artificial Sequence
  Synthetic polynucleotide
atcatctcaccttgcctcctgagctatctacgatagttcctgcaggatgttacataaagaatgttacataatcgatgttacataagacatgttacataactaatgttacataaactatgttacataatgcatgttacataagtaatgttacataaggcgcgccatgcttcatcagactct

SEQ ID NO: 7327 - DNA, 180 bp, Artificial Sequence; identical to SEQ ID NO: 7326
  Synthetic polynucleotide

SEQ ID NO: 7328 - DNA, 148 bp, Artificial Sequence
  Synthetic polynucleotide
atcatctcaccttgcctcctgggacagccacctcctatcctgcaggtaattggagataattggtcgtaattgggactaattggctataattggacttaattggtgctaattgggtataattggggcgcgccatgcttcatcagactct

SEQ ID NO: 7329 - DNA, 148 bp, Artificial Sequence; identical to SEQ ID NO: 7328
  Synthetic polynucleotide

SEQ ID NO: 7330 - DNA, 191 bp, Artificial Sequence
  Synthetic polynucleotide
atcatctcaccttgcctcctgccattaggataatcacacctgcagggttgttaagtggttatgagagttgttaagtggttatgtcggttgttaagtggttatggacgttgttaagtggttatgctagttgttaagtggttatgactgttgttaagtggttatgtgcggcgcgccatgcttcatcagactct

SEQ ID NO: 7331 - DNA, 191 bp, Artificial Sequence; identical to SEQ ID NO: 7330
  Synthetic polynucleotide

SEQ ID NO: 7332 - DNA, 172 bp, Artificial Sequence
  Synthetic polynucleotide
atcatctcaccttgcctcctgaggtagtcagcagtttccctgcagggacaggtgctagagacaggtgcttcggacaggtgctgacgacaggtgctctagacaggtgctactgacaggtgcttgcgacaggtgctgtagacaggtgctggcgcgccatgcttcatcagactct

SEQ ID NO: 7333 - DNA, 172 bp, Artificial Sequence; identical to SEQ ID NO: 7332
  Synthetic polynucleotide

SEQ ID NO: 7334 - DNA, 172 bp, Artificial Sequence
  Synthetic polynucleotide
atcatctcaccttgcctcctgtaataaccgaaccacgacctgcagggggccacgtgagagggccacgtgtcggggccacgtggacgggccacgtgctagggccacgtgactgggccacgtgtgcgggccacgtggtagggccacgtgggcgcgccatgcttcatcagactct

SEQ ID NO: 7335 - DNA, 172 bp, Artificial Sequence; identical to SEQ ID NO: 7334
  Synthetic polynucleotide

SEQ ID NO: 7336 - DNA, 191 bp, Artificial Sequence
  Synthetic polynucleotide
atcatctcaccttgcctcctgccatcacttcgtataaccctgcagggggtacataatgttcccagagggtacataatgttccctcggggtacataatgttcccgacgggtacataatgttcccctagggtacataatgttcccactgggtacataatgttccctgcggcgcgccatgcttcatcagactct

SEQ ID NO: 7337 - DNA, 191 bp, Artificial Sequence; identical to SEQ ID NO: 7336
  Synthetic polynucleotide

SEQ ID NO: 7338 - DNA, 188 bp, Artificial Sequence
  Synthetic polynucleotide
atcatctcaccttgcctcctgttgtcaatatccaggttcctgcaggatctcgtttggaagaatctcgtttggatcgatctcgtttggagacatctcgtttggactaatctcgtttggaactatctcgtttggatgcatctcgtttggagtaatctcgtttggaggcgcgccatgcttcatcagactct

SEQ ID NO: 7339 - DNA, 188 bp, Artificial Sequence; identical to SEQ ID NO: 7338
  Synthetic polynucleotide

SEQ ID NO: 7340 - DNA, 156 bp, Artificial Sequence
  Synthetic polynucleotide
atcatctcaccttgcctcctggaataagggcgggaaatcctgcaggaaatgtaaagaaaatgtaatcgaaatgtaagacaaatgtaactaaaatgtaaactaaatgtaatgcaaatgtaagtaaaatgtaaggcgcgccatgcttcatcagactct

SEQ ID NO: 7341 - DNA, 156 bp, Artificial Sequence; identical to SEQ ID NO: 7340
  Synthetic polynucleotide

SEQ ID NO: 7342 - DNA, 197 bp, Artificial Sequence
  Synthetic polynucleotide
atcatctcaccttgcctcctgtcactgaaacgccagcacctgcagggaccacgcccttattagagaccacgcccttatttcggaccacgcccttattgacgaccacgcccttattctagaccacgcccttattactgaccacgcccttatttgcgaccacgcccttattgtaggcgcgccatgcttcatcagactct

SEQ ID NO: 7343 - DNA, 197 bp, Artificial Sequence; identical to SEQ ID NO: 7342
  Synthetic polynucleotide

SEQ ID NO: 7344 - DNA, 190 bp, Artificial Sequence
  Synthetic polynucleotide
atcatctcaccttgcctcctgtcagcaccgcgcatcttcctgcaggggcaaacaggaaatagaggcaaacaggaaattcgggcaaacaggaaatgacggcaaacaggaaatctaggcaaacaggaaatactggcaaacaggaaattgcggcaaacaggaaatgtaggcgcgccatgcttcatcagactct

SEQ ID NO: 7345 - DNA, 190 bp, Artificial Sequence; identical to SEQ ID NO: 7344
  Synthetic polynucleotide

SEQ ID NO: 7346 - DNA, 190 bp, Artificial Sequence
  Synthetic polynucleotide
atcatctcaccttgcctcctgttgtggtactgcacgcacctgcaggatgagtcatctcctagaatgagtcatctccttcgatgagtcatctcctgacatgagtcatctcctctaatgagtcatctcctactatgagtcatctccttgcatgagtcatctcctgtaggcgcgccatgcttcatcagactct

SEQ ID NO: 7347 - DNA, 190 bp, Artificial Sequence; identical to SEQ ID NO: 7346
  Synthetic polynucleotide

SEQ ID NO: 7348 - DNA, 156 bp, Artificial Sequence
  Synthetic polynucleotide
atcatctcaccttgcctcctgtgtagtgatagtagaagcctgcaggcacctgtcagacacctgtctcgcacctgtcgaccacctgtcctacacctgtcactcacctgtctgccacctgtcgtacacctgtcggcgcgccatgcttcatcagactct

SEQ ID NO: 7349 - DNA, 156 bp, Artificial Sequence; identical to SEQ ID NO: 7348
  Synthetic polynucleotide

SEQ ID NO: 7350 - DNA, 172 bp, Artificial Sequence
  Synthetic polynucleotide
atcatctcaccttgcctcctggatctcacgcttgaccccctgcagggatgacgtgtagagatgacgtgttcggatgacgtgtgacgatgacgtgtctagatgacgtgtactgatgacgtgttgcgatgacgtgtgtagatgacgtgtggcgcgccatgcttcatcagactct

SEQ ID NO: 7351 - DNA, 172 bp, Artificial Sequence; identical to SEQ ID NO: 7350
  Synthetic polynucleotide

SEQ ID NO: 7352 - DNA, 190 bp, Artificial Sequence
  Synthetic polynucleotide
atcatctcaccttgcctcctgggtgccagctaggaaaccctgcagggaacagaatgttccagagaacagaatgttcctcggaacagaatgttccgacgaacagaatgttccctagaacagaatgttccactgaacagaatgttcctgcgaacagaatgttccgtaggcgcgccatgcttcatcagactct

SEQ ID NO: 7353 - DNA, 190 bp, Artificial Sequence; identical to SEQ ID NO: 7352
  Synthetic polynucleotide

SEQ ID NO: 7354 - DNA, 185 bp, Artificial Sequence
  Synthetic polynucleotide
atcatctcaccttgcctcctgacacccacatcggtatgcctgcagggctatttgtcgtaaatagagctatttgtcgtaaattcggctatttgtcgtaaatgacgctatttgtcgtaaatctagctatttgtcgtaaatactgctatttgtcgtaaattgcggcgcgccatgcttcatcagactct

SEQ ID NO: 7355 - DNA, 185 bp, Artificial Sequence; identical to SEQ ID NO: 7354
  Synthetic polynucleotide

SEQ ID NO: 7356 - DNA, 164 bp, Artificial Sequence
  Synthetic polynucleotide
atcatctcaccttgcctcctgtatcccagtgatatacacctgcaggctcttatctagactcttatcttcgctcttatctgacctcttatctctactcttatctactctcttatcttgcctcttatctgtactcttatctggcgcgccatgcttcatcagactct

SEQ ID NO: 7357 - DNA, 164 bp, Artificial Sequence; identical to SEQ ID NO: 7356
  Synthetic polynucleotide

SEQ ID NO: 7358 - DNA, 180 bp, Artificial Sequence
  Synthetic polynucleotide
atcatctcaccttgcctcctgtaattccgcttgaacaccctgcaggtgacgtcagagagatgacgtcagagtcgtgacgtcagaggactgacgtcagagctatgacgtcagagacttgacgtcagagtgctgacgtcagaggtatgacgtcagagggcgcgccatgcttcatcagactct

SEQ ID NO: 7359 - DNA, 180 bp, Artificial Sequence; identical to SEQ ID NO: 7358
  Synthetic polynucleotide

SEQ ID NO: 7360 - DNA, 172 bp, Artificial Sequence
  Synthetic polynucleotide
atcatctcaccttgcctcctgggcagcacaaagattcgcctgcagggcggattaacagagcggattaactcggcggattaacgacgcggattaacctagcggattaacactgcggattaactgcgcggattaacgtagcggattaacggcgcgccatgcttcatcagactct

SEQ ID NO: 7361 - DNA, 172 bp, Artificial Sequence; identical to SEQ ID NO: 7360
  Synthetic polynucleotide

SEQ ID NO: 7362 - DNA, 196 bp, Artificial Sequence
  Synthetic polynucleotide
atcatctcaccttgcctcctggtctatacagttactcccctgcagggtcattttggaagagagtcattttggaagtcggtcattttggaaggacgtcattttggaagctagtcattttggaagactgtcattttggaagtgcgtcattttggaaggtagtcattttggaagggcgcgccatgcttcatcagactct

SEQ ID NO: 7363 - DNA, 196 bp, Artificial Sequence; identical to SEQ ID NO: 7362
  Synthetic polynucleotide

SEQ ID NO: 7364 - DNA, 140 bp, Artificial Sequence
  Synthetic polynucleotide
atcatctcaccttgcctcctgccctactccatgggctacctgcaggataattagaataatttcgataattgacataattctaataattactataatttgcataattgtaataattggcgcgccatgcttcatcagactct

SEQ ID NO: 7365 - DNA, 140 bp, Artificial Sequence; identical to SEQ ID NO: 7364
  Synthetic polynucleotide

SEQ ID NO: 7366 - DNA, 197 bp, Artificial Sequence
  Synthetic polynucleotide
atcatctcaccttgcctcctgacgttgtggtcctgagacctgcaggtcagcaccatggacaagatcagcaccatggacatcgtcagcaccatggacagactcagcaccatggacactatcagcaccatggacaacttcagcaccatggacatgctcagcaccatggacagtaggcgcgccatgcttcatcagactct

SEQ ID NO: 7367 - DNA, 197 bp, Artificial Sequence; identical to SEQ ID NO: 7366
  Synthetic polynucleotide

SEQ ID NO: 7368 - DNA, 191 bp, Artificial Sequence
  Synthetic polynucleotide
atcatctcaccttgcctcctgaaagcctacctaattcacctgcaggacaagcaattaaagaatagaacaagcaattaaagaattcgacaagcaattaaagaatgacacaagcaattaaagaatctaacaagcaattaaagaatactacaagcaattaaagaattgcggcgcgccatgcttcatcagactct

SEQ ID NO: 7369 - DNA, 191 bp, Artificial Sequence; identical to SEQ ID NO: 7368
  Synthetic polynucleotide

SEQ ID NO: 7370 - DNA, 172 bp, Artificial Sequence
  Synthetic polynucleotide
atcatctcaccttgcctcctgagacagggtaactcgttcctgcaggggtggtacggagaggtggtacggtcgggtggtacgggacggtggtacggctaggtggtacggactggtggtacggtgcggtggtacgggtaggtggtacggggcgcgccatgcttcatcagactct

SEQ ID NO: 7371 - DNA, 172 bp, Artificial Sequence; identical to SEQ ID NO: 7370
  Synthetic polynucleotide

SEQ ID NO: 7372 - DNA, 197 bp, Artificial Sequence
  Synthetic polynucleotide
atcatctcaccttgcctcctgagctaagctgcgctggacctgcaggcttctagaaggttctagacttctagaaggttcttcgcttctagaaggttctgaccttctagaaggttctctacttctagaaggttctactcttctagaaggttcttgccttctagaaggttctgtaggcgcgccatgcttcatcagactct

SEQ ID NO: 7373 - DNA, 197 bp, Artificial Sequence; identical to SEQ ID NO: 7372
  Synthetic polynucleotide

SEQ ID NO: 7374 - DNA, 188 bp, Artificial Sequence
  Synthetic polynucleotide
atcatctcaccttgcctcctgaatcacctgcgggaaggcctgcagggaccatctgttcagagaccatctgttctcggaccatctgttcgacgaccatctgttcctagaccatctgttcactgaccatctgttctgcgaccatctgttcgtagaccatctgttcggcgcgccatgcttcatcagactct

SEQ ID NO: 7375 - DNA, 188 bp, Artificial Sequence; identical to SEQ ID NO: 7374
  Synthetic polynucleotide

SEQ ID NO: 7376 - DNA, 156 bp, Artificial Sequence
  Synthetic polynucleotide
atcatctcaccttgcctcctgtctggcgttagacaatgcctgcaggcttaattgagacttaattgtcgcttaattggaccttaattgctacttaattgactcttaattgtgccttaattggtacttaattgggcgcgccatgcttcatcagactct

SEQ ID NO: 7377 - DNA, 156 bp, Artificial Sequence; identical to SEQ ID NO: 7376
  Synthetic polynucleotide

SEQ ID NO: 7378 - DNA, 172 bp, Artificial Sequence
  Synthetic polynucleotide
atcatctcaccttgcctcctgcgccattctggtagttacctgcaggtttaagtggcagatttaagtggctcgtttaagtggcgactttaagtggcctatttaagtggcacttttaagtggctgctttaagtggcgtatttaagtggcggcgcgccatgcttcatcagactct

SEQ ID NO: 7379 - DNA, 172 bp, Artificial Sequence; identical to SEQ ID NO: 7378
  Synthetic polynucleotide

SEQ ID NO: 7380 - DNA, 197 bp, Artificial Sequence
  Synthetic polynucleotide
atcatctcaccttgcctcctggatgttctcgacgacttcctgcaggtttgcataacaaaaaagatttgcataacaaaaatcgtttgcataacaaaaagactttgcataacaaaaactatttgcataacaaaaaacttttgcataacaaaaatgctttgcataacaaaaagtaggcgcgccatgcttcatcagactct

SEQ ID NO: 7381 - DNA, 197 bp, Artificial Sequence; identical to SEQ ID NO: 7380
  Synthetic polynucleotide

SEQ ID NO: 7382 - DNA, 156 bp, Artificial Sequence
  Synthetic polynucleotide
atcatctcaccttgcctcctgataaactctaggtgcgtcctgcaggtcagcaggagatcagcaggtcgtcagcagggactcagcaggctatcagcaggacttcagcaggtgctcagcagggtatcagcaggggcgcgccatgcttcatcagactct

SEQ ID NO: 7383 - DNA, 156 bp, Artificial Sequence; identical to SEQ ID NO: 7382
  Synthetic polynucleotide

SEQ ID NO: 7384 - DNA, 196 bp, Artificial Sequence
  Synthetic polynucleotide
atcatctcaccttgcctcctgttaggagtgactcgtgtcctgcaggataagaacaccctgtacccgccagaataagaacaccctgtacccgcctcgataagaacaccctgtacccgccgacataagaacaccctgtacccgccctaataagaacaccctgtacccgccactggcgcgccatgcttcatcagactct

SEQ ID NO: 7385 - DNA, 196 bp, Artificial Sequence; identical to SEQ ID NO: 7384
  Synthetic polynucleotide

SEQ ID NO: 7386 - DNA, 190 bp, Artificial Sequence
  Synthetic polynucleotide
atcatctcaccttgcctcctggctctgactatagccgacctgcagggtgttgtttacattagagtgttgtttacatttcggtgttgtttacattgacgtgttgtttacattctagtgttgtttacattactgtgttgtttacatttgcgtgttgtttacattgtaggcgcgccatgcttcatcagactct

SEQ ID NO: 7387 - DNA, 190 bp, Artificial Sequence; identical to SEQ ID NO: 7386
  Synthetic polynucleotide

SEQ ID NO: 7388 - DNA, 188 bp, Artificial Sequence
  Synthetic polynucleotide
atcatctcaccttgcctcctgagcgccttcagcaaaggcctgcaggtattacgtaacaagatattacgtaacatcgtattacgtaacagactattacgtaacactatattacgtaacaacttattacgtaacatgctattacgtaacagtatattacgtaacaggcgcgccatgcttcatcagactct

SEQ ID NO: 7389 - DNA, 188 bp, Artificial Sequence; identical to SEQ ID NO: 7388
  Synthetic polynucleotide

SEQ ID NO: 7390 - DNA, 190 bp, Artificial Sequence
  Synthetic polynucleotide
atcatctcaccttgcctcctgacatccaggcacacatccctgcaggaaaaaatcgataatagaaaaaaatcgataattcgaaaaaatcgataatgacaaaaaatcgataatctaaaaaaatcgataatactaaaaaatcgataattgcaaaaaatcgataatgtaggcgcgccatgcttcatcagactct

SEQ ID NO: 7391 - DNA, 190 bp, Artificial Sequence; identical to SEQ ID NO: 7390
  Synthetic polynucleotide

SEQ ID NO: 7392 - DNA, 156 bp, Artificial Sequence
  Synthetic polynucleotide
atcatctcaccttgcctcctggatcttcgcggtttaaacctgcagggtaattggagagtaattggtcggtaattgggacgtaattggctagtaattggactgtaattggtgcgtaattgggtagtaattggggcgcgccatgcttcatcagactct

SEQ ID NO: 7393 - DNA, 156 bp, Artificial Sequence; identical to SEQ ID NO: 7392
  Synthetic polynucleotide

SEQ ID NO: 7394 - DNA, 148 bp, Artificial Sequence
  Synthetic polynucleotide
atcatctcaccttgcctcctgaaagtagacataggcgtcctgcaggccaattaagaccaattatcgccaattagacccaattactaccaattaactccaattatgcccaattagtaccaattaggcgcgccatgcttcatcagactct

SEQ ID NO: 7395 - DNA, 148 bp, Artificial Sequence; identical to SEQ ID NO: 7394
  Synthetic polynucleotide

SEQ ID NO: 7396 - DNA, 164 bp, Artificial Sequence
  Synthetic polynucleotide
atcatctcaccttgcctcctgtgtcttcgtcccataaacctgcaggagggattaaagaagggattaatcgagggattaagacagggattaactaagggattaaactagggattaatgcagggattaagtaagggattaaggcgcgccatgcttcatcagactct

SEQ ID NO: 7397 - DNA, 164 bp, Artificial Sequence; identical to SEQ ID NO: 7396
  Synthetic polynucleotide

SEQ ID NO: 7398 - DNA, 191 bp, Artificial Sequence
  Synthetic polynucleotide
atcatctcaccttgcctcctgaccacgtggtccacctacctgcaggtctgatgtctggatttgagatctgatgtctggatttgtcgtctgatgtctggatttggactctgatgtctggatttgctatctgatgtctggatttgacttctgatgtctggatttgtgcggcgcgccatgcttcatcagactct

SEQ ID NO: 7399 - DNA, 191 bp, Artificial Sequence; identical to SEQ ID NO: 7398
  Synthetic polynucleotide

SEQ ID NO: 7400 - DNA, 156 bp, Artificial Sequence
  Synthetic polynucleotide
atcatctcaccttgcctcctgcgtgctggtagtaatagcctgcaggatgacgtaagaatgacgtatcgatgacgtagacatgacgtactaatgacgtaactatgacgtatgcatgacgtagtaatgacgtaggcgcgccatgcttcatcagactct

SEQ ID NO: 7401 - DNA, 156 bp, Artificial Sequence; identical to SEQ ID NO: 7400
  Synthetic polynucleotide

SEQ ID NO: 7402 - DNA, 164 bp, Artificial Sequence
  Synthetic polynucleotide
atcatctcaccttgcctcctgcgtctagagatccgtcccctgcaggagtgccaatagaagtgccaattcgagtgccaatgacagtgccaatctaagtgccaatactagtgccaattgcagtgccaatgtaagtgccaatggcgcgccatgcttcatcagactct

SEQ ID NO: 7403 - DNA, 164 bp, Artificial Sequence; identical to SEQ ID NO: 7402
  Synthetic polynucleotide

SEQ ID NO: 7404 - DNA, 164 bp, Artificial Sequence
  Synthetic polynucleotide
atcatctcaccttgcctcctgagcaatttacttgatcccctgcaggcttaatcccagacttaatccctcgcttaatcccgaccttaatcccctacttaatcccactcttaatccctgccttaatcccgtacttaatcccggcgcgccatgcttcatcagactct

SEQ ID NO: 7405 - DNA, 164 bp, Artificial Sequence; identical to SEQ ID NO: 7404
  Synthetic polynucleotide

SEQ ID NO: 7406 - DNA, 180 bp, Artificial Sequence
  Synthetic polynucleotide
atcatctcaccttgcctcctgatgcctataaatggccgcctgcaggcctccggcccgagacctccggcccgtcgcctccggcccggaccctccggcccgctacctccggcccgactcctccggcccgtgccctccggcccggtacctccggcccgggcgcgccatgcttcatcagactct

SEQ ID NO: 7407 - DNA, 180 bp, Artificial Sequence; identical to SEQ ID NO: 7406
  Synthetic polynucleotide

SEQ ID NO: 7408 - DNA, 191 bp, Artificial Sequence
  Synthetic polynucleotide
atcatctcaccttgcctcctggacctaagcgaagacctcctgcaggagttaattattaaccaaagaagttaattattaaccaatcgagttaattattaaccaagacagttaattattaaccaactaagttaattattaaccaaactagttaattattaaccaatgcggcgcgccatgcttcatcagactct

SEQ ID NO: 7409 - DNA, 191 bp, Artificial Sequence; identical to SEQ ID NO: 7408
  Synthetic polynucleotide

SEQ ID NO: 7410 - DNA, 172 bp, Artificial Sequence
  Synthetic polynucleotide
atcatctcaccttgcctcctgccagagagttaacggaacctgcaggtcacgtgactagatcacgtgacttcgtcacgtgactgactcacgtgactctatcacgtgactacttcacgtgacttgctcacgtgactgtatcacgtgactggcgcgccatgcttcatcagactct

SEQ ID NO: 7411 - DNA, 172 bp, Artificial Sequence; identical to SEQ ID NO: 7410
  Synthetic polynucleotide

SEQ ID NO: 7412 - DNA, 196 bp, Artificial Sequence
  Synthetic polynucleotide
atcatctcaccttgcctcctgcatagtgtttcgacaaacctgcaggccacctgttgcatagaccacctgttgcattcgccacctgttgcatgacccacctgttgcatctaccacctgttgcatactccacctgttgcattgcccacctgttgcatgtaccacctgttgcatggcgcgccatgcttcatcagactct

SEQ ID NO: 7413 - DNA, 196 bp, Artificial Sequence; identical to SEQ ID NO: 7412
  Synthetic polynucleotide

SEQ ID NO: 7414 - DNA, 185 bp, Artificial Sequence
  Synthetic polynucleotide
atcatctcaccttgcctcctggtgcagtgtatcacgaccctgcaggtggcgcgcgcgcctgaagatggcgcgcgcgcctgatcgtggcgcgcgcgcctgagactggcgcgcgcgcctgactatggcgcgcgcgcctgaacttggcgcgcgcgcctgatgcggcgcgccatgcttcatcagactct

SEQ ID NO: 7415 - DNA, 185 bp, Artificial Sequence; identical to SEQ ID NO: 7414
  Synthetic polynucleotide

SEQ ID NO: 7416 - DNA, 190 bp, Artificial Sequence
  Synthetic polynucleotide
atcatctcaccttgcctcctgtcgagtactcgtgcctccctgcaggcaggcctcggccccagacaggcctcggcccctcgcaggcctcggccccgaccaggcctcggccccctacaggcctcggccccactcaggcctcggcccctgccaggcctcggccccgtaggcgcgccatgcttcatcagactct

SEQ ID NO: 7417 - DNA, 190 bp, Artificial Sequence; identical to SEQ ID NO: 7416
  Synthetic polynucleotide

SEQ ID NO: 7418 - DNA, 148 bp, Artificial Sequence
  Synthetic polynucleotide
atcatctcaccttgcctcctgttcgacggcattgtctacctgcaggaagtgaaagaaagtgaatcgaagtgaagacaagtgaactaaagtgaaactaagtgaatgcaagtgaagtaaagtgaaggcgcgccatgcttcatcagactct

SEQ ID NO: 7419 - DNA, 148 bp, Artificial Sequence; identical to SEQ ID NO: 7418
  Synthetic polynucleotide

SEQ ID NO: 7420 - DNA, 196 bp, Artificial Sequence
  Synthetic polynucleotide
atcatctcaccttgcctcctgtgactctggtgctgggacctgcaggcccttgacctttgagacccttgacctttgtcgcccttgacctttggaccccttgacctttgctacccttgacctttgactcccttgacctttgtgccccttgacctttggtacccttgacctttgggcgcgccatgcttcatcagactct

SEQ ID NO: 7421 - DNA, 196 bp, Artificial Sequence; identical to SEQ ID NO: 7420
  Synthetic polynucleotide

SEQ ID NO: 7422 - DNA, 172 bp, Artificial Sequence
  Synthetic polynucleotide
atcatctcaccttgcctcctgtgacgcgaagcttcttgcctgcagggttcgaatccagagttcgaatcctcggttcgaatccgacgttcgaatccctagttcgaatccactgttcgaatcctgcgttcgaatccgtagttcgaatccggcgcgccatgcttcatcagactct

SEQ ID NO: 7423 - DNA, 172 bp, Artificial Sequence; identical to SEQ ID NO: 7422
  Synthetic polynucleotide

SEQ ID NO: 7424 - DNA, 188 bp, Artificial Sequence
  Synthetic polynucleotide
atcatctcaccttgcctcctgaaagcgacggtgcttcacctgcaggaaagatcaaaggagaaaagatcaaaggtcgaaagatcaaagggacaaagatcaaaggctaaaagatcaaaggactaaagatcaaaggtgcaaagatcaaagggtaaaagatcaaaggggcgcgccatgcttcatcagactct

SEQ ID NO: 7425 - DNA, 188 bp, Artificial Sequence; identical to SEQ ID NO: 7424
  Synthetic polynucleotide

SEQ ID NO: 7426 - DNA, 172 bp, Artificial Sequence
  Synthetic polynucleotide
atcatctcaccttgcctcctgatgtcgggataattaagcctgcaggaaatctcgcgagaaaatctcgcgtcgaaatctcgcggacaaatctcgcgctaaaatctcgcgactaaatctcgcgtgcaaatctcgcggtaaaatctcgcgggcgcgccatgcttcatcagactct

SEQ ID NO: 7427 - DNA, 172 bp, Artificial Sequence; identical to SEQ ID NO: 7426
  Synthetic polynucleotide

SEQ ID NO: 7428 - DNA, 172 bp, Artificial Sequence
  Synthetic polynucleotide
atcatctcaccttgcctcctgcagttgaagtaggccgtcctgcaggtgtttactttagatgtttacttttcgtgtttactttgactgtttactttctatgtttactttacttgtttacttttgctgtttactttgtatgtttactttggcgcgccatgcttcatcagactct

SEQ ID NO: 7429 - DNA, 172 bp, Artificial Sequence; identical to SEQ ID NO: 7428
  Synthetic polynucleotide

SEQ ID NO: 7430 - DNA, 172 bp, Artificial Sequence
  Synthetic polynucleotide
atcatctcaccttgcctcctggcaagatggtaaggcgccctgcaggaccggaagagagaaccggaagagtcgaccggaagaggacaccggaagagctaaccggaagagactaccggaagagtgcaccggaagaggtaaccggaagagggcgcgccatgcttcatcagactct

SEQ ID NO: 7431 - DNA, 172 bp, Artificial Sequence; identical to SEQ ID NO: 7430
  Synthetic polynucleotide

SEQ ID NO: 7432 - DNA, 186 bp, Artificial Sequence
  Synthetic polynucleotide
atcatctcaccttgcctcctgcctaccattatggtttccctgcagggatttcccatcatgccttgcagagatttcccatcatgccttgctcggatttcccatcatgccttgcgacgatttcccatcatgccttgcctagatttcccatcatgccttgcactggcgcgccatgcttcatcagactct

SEQ ID NO: 7433 - DNA, 186 bp, Artificial Sequence; identical to SEQ ID NO: 7432
  Synthetic polynucleotide

SEQ ID NO: 7434 - DNA, 196 bp, Artificial Sequence
  Synthetic polynucleotide
atcatctcaccttgcctcctggttctggtataacagcccctgcaggcataatttatgcaagacataatttatgcatcgcataatttatgcagaccataatttatgcactacataatttatgcaactcataatttatgcatgccataatttatgcagtacataatttatgcaggcgcgccatgcttcatcagactct

SEQ ID NO: 7435 - DNA, 196 bp, Artificial Sequence; identical to SEQ ID NO: 7434
  Synthetic polynucleotide

SEQ ID NO: 7436 - DNA, 200 bp, Artificial Sequence
  Synthetic polynucleotide
atcatctcaccttgcctcctgaaccgctaacccgggttcctgcaggcaaggtcagggtgacctggagacaaggtcagggtgacctggtcgcaaggtcagggtgacctgggaccaaggtcagggtgacctggctacaaggtcagggtgacctggactcaaggtcagggtgacctggggcgcgccatgcttcatcagactct

SEQ ID NO: 7437 - DNA, 200 bp, Artificial Sequence; identical to SEQ ID NO: 7436
  Synthetic polynucleotide

SEQ ID NO: 7438 - DNA, 164 bp, Artificial Sequence
  Synthetic polynucleotide
atcatctcaccttgcctcctgcgtcagcttacccgatacctgcaggtcagctgatagatcagctgattcgtcagctgatgactcagctgatctatcagctgatacttcagctgattgctcagctgatgtatcagctgatggcgcgccatgcttcatcagactct

SEQ ID NO: 7439 - DNA, 164 bp, Artificial Sequence; identical to SEQ ID NO: 7438
  Synthetic polynucleotide

SEQ ID NO: 7440 - DNA, 148 bp, Artificial Sequence
  Synthetic polynucleotide
atcatctcaccttgcctcctgtttaccaaagggtgctacctgcagggtatcacagagtatcactcggtatcacgacgtatcacctagtatcacactgtatcactgcgtatcacgtagtatcacggcgcgccatgcttcatcagactct

SEQ ID NO: 7441 - DNA, 148 bp, Artificial Sequence; identical to SEQ ID NO: 7440
  Synthetic polynucleotide

SEQ ID NO: 7442 - DNA, 164 bp, Artificial Sequence
  Synthetic polynucleotide
atcatctcaccttgcctcctgtattacttacagactcccctgcaggacgtcatcaagaacgtcatcatcgacgtcatcagacacgtcatcactaacgtcatcaactacgtcatcatgcacgtcatcagtaacgtcatcaggcgcgccatgcttcatcagactct

SEQ ID NO: 7443 - DNA, 164 bp, Artificial Sequence; identical to SEQ ID NO: 7442
  Synthetic polynucleotide

SEQ ID NO: 7444 - DNA, 172 bp, Artificial Sequence
  Synthetic polynucleotide
atcatctcaccttgcctcctggcatgaacggcagtgcacctgcaggccgccatgttagaccgccatgtttcgccgccatgttgacccgccatgttctaccgccatgttactccgccatgtttgcccgccatgttgtaccgccatgttggcgcgccatgcttcatcagactct

SEQ ID NO: 7445 - DNA, 172 bp, Artificial Sequence; identical to SEQ ID NO: 7444
  Synthetic polynucleotide

SEQ ID NO: 7446 - DNA, 172 bp, Artificial Sequence
  Synthetic polynucleotide
atcatctcaccttgcctcctgaagagctacggattagacctgcaggttaatgacctagattaatgaccttcgttaatgacctgacttaatgacctctattaatgacctactttaatgaccttgcttaatgacctgtattaatgacctggcgcgccatgcttcatcagactct

SEQ ID NO: 7447 - DNA, 172 bp, Artificial Sequence; identical to SEQ ID NO: 7446
  Synthetic polynucleotide

SEQ ID NO: 7448 - DNA, 187 bp, Artificial Sequence
  Synthetic polynucleotide
atcatctcaccttgcctcctgagcgtgtcttcttgcctcctgcaggatttaaccattataaccaattaataaagaatttaaccattataaccaattaataatcgatttaaccattataaccaattaataagacatttaaccattataaccaattaataactaggcgcgccatgcttcatcagactct

SEQ ID NO: 7449 - DNA, 187 bp, Artificial Sequence; identical to SEQ ID NO: 7448
  Synthetic polynucleotide

SEQ ID NO: 7450 - DNA, 172 bp, Artificial Sequence
  Synthetic polynucleotide
atcatctcaccttgcctcctgaagaacgcacacatgctcctgcaggcaagtgcgtgagacaagtgcgtgtcgcaagtgcgtggaccaagtgcgtgctacaagtgcgtgactcaagtgcgtgtgccaagtgcgtggtacaagtgcgtgggcgcgccatgcttcatcagactct

SEQ ID NO: 7451 - DNA, 172 bp, Artificial Sequence; identical to SEQ ID NO: 7450
  Synthetic polynucleotide

SEQ ID NO: 7452 - DNA, 197 bp, Artificial Sequence
  Synthetic polynucleotide
atcatctcaccttgcctcctgtcggtcgataacgctcacctgcaggtagtttcggtttcggagatagtttcggtttcggtcgtagtttcggtttcgggactagtttcggtttcggctatagtttcggtttcggacttagtttcggtttcggtgctagtttcggtttcgggtaggcgcgccatgcttcatcagactct

SEQ ID NO: 7453 - DNA, 197 bp, Artificial Sequence; identical to SEQ ID NO: 7452
  Synthetic polynucleotide

SEQ ID NO: 7454 - DNA, 172 bp, Artificial Sequence
  Synthetic polynucleotide
atcatctcaccttgcctcctgaggcctctttcaattgtcctgcagggagttgtagtagagagttgtagttcggagttgtagtgacgagttgtagtctagagttgtagtactgagttgtagttgcgagttgtagtgtagagttgtagtggcgcgccatgcttcatcagactct

SEQ ID NO: 7455 - DNA, 172 bp, Artificial Sequence; identical to SEQ ID NO: 7454
  Synthetic polynucleotide

SEQ ID NO: 7456 - DNA, 196 bp, Artificial Sequence
  Synthetic polynucleotide
atcatctcaccttgcctcctggatggagtgattagagacctgcaggcagattgcaaaatagacagattgcaaaattcgcagattgcaaaatgaccagattgcaaaatctacagattgcaaaatactcagattgcaaaattgccagattgcaaaatgtacagattgcaaaatggcgcgccatgcttcatcagactct

SEQ ID NO: 7457 - DNA, 196 bp, Artificial Sequence; identical to SEQ ID NO: 7456
  Synthetic polynucleotide

SEQ ID NO: 7458 - DNA, 172 bp, Artificial Sequence
  Synthetic polynucleotide
atcatctcaccttgcctcctgcagcatagccaacaaatcctgcaggggtcaggtcaagaggtcaggtcatcgggtcaggtcagacggtcaggtcactaggtcaggtcaactggtcaggtcatgcggtcaggtcagtaggtcaggtcaggcgcgccatgcttcatcagactct

SEQ ID NO: 7459 - DNA, 172 bp, Artificial Sequence; identical to SEQ ID NO: 7458
  Synthetic polynucleotide

SEQ ID NO: 7460 - DNA, 185 bp, Artificial Sequence
  Synthetic polynucleotide
atcatctcaccttgcctcctgacctgatctgttgtcatcctgcaggcaattagcaccaattaagacaattagcaccaattatcgcaattagcaccaattagaccaattagcaccaattactacaattagcaccaattaactcaattagcaccaattatgcggcgcgccatgcttcatcagactct

SEQ ID NO: 7461 - DNA, 185 bp, Artificial Sequence; identical to SEQ ID NO: 7460
  Synthetic polynucleotide

SEQ ID NO: 7462 - DNA, 180 bp, Artificial Sequence
  Synthetic polynucleotide
atcatctcaccttgcctcctgaaagacccatcatgtatcctgcaggcattgcgtgacagacattgcgtgactcgcattgcgtgacgaccattgcgtgacctacattgcgtgacactcattgcgtgactgccattgcgtgacgtacattgcgtgacggcgcgccatgcttcatcagactct

SEQ ID NO: 7463 - DNA, 180 bp, Artificial Sequence; identical to SEQ ID NO: 7462
  Synthetic polynucleotide

SEQ ID NO: 7464 - DNA, 172 bp, Artificial Sequence
  Synthetic polynucleotide
atcatctcaccttgcctcctgcacatggcctacagacgcctgcaggtaggggataaagataggggataatcgtaggggataagactaggggataactataggggataaacttaggggataatgctaggggataagtataggggataaggcgcgccatgcttcatcagactct

SEQ ID NO: 7465 - DNA, 172 bp, Artificial Sequence; identical to SEQ ID NO: 7464
  Synthetic polynucleotide

SEQ ID NO: 7466 - DNA, 197 bp, Artificial Sequence
  Synthetic polynucleotide
atcatctcaccttgcctcctgtagactaatctaaggtgcctgcaggctgttgctaggcagaagactgttgctaggcagatcgctgttgctaggcagagacctgttgctaggcagactactgttgctaggcagaactctgttgctaggcagatgcctgttgctaggcagagtaggcgcgccatgcttcatcagactct

SEQ ID NO: 7467 - DNA, 197 bp, Artificial Sequence; identical to SEQ ID NO: 7466
  Synthetic polynucleotide

SEQ ID NO: 7468 - DNA, 164 bp, Artificial Sequence
  Synthetic polynucleotide
atcatctcaccttgcctcctgcgatgtatagttacccgcctgcaggacgtgacttagaacgtgactttcgacgtgacttgacacgtgacttctaacgtgacttactacgtgactttgcacgtgacttgtaacgtgacttggcgcgccatgcttcatcagactct

SEQ ID NO: 7469 - DNA, 164 bp, Artificial Sequence; identical to SEQ ID NO: 7468
  Synthetic polynucleotide

SEQ ID NO: 7470 - DNA, 148 bp, Artificial Sequence
  Synthetic polynucleotide
atcatctcaccttgcctcctgagctgcctggttctgagcctgcaggccaactgagaccaactgtcgccaactggacccaactgctaccaactgactccaactgtgcccaactggtaccaactgggcgcgccatgcttcatcagactct

SEQ ID NO: 7471 - DNA, 148 bp, Artificial Sequence; identical to SEQ ID NO: 7470
  Synthetic polynucleotide

SEQ ID NO: 7472 - DNA, 172 bp, Artificial Sequence
  Synthetic polynucleotide
atcatctcaccttgcctcctggtgagagacattgtgcgcctgcaggaaaccggataagaaaaccggatatcgaaaccggatagacaaaccggatactaaaaccggataactaaaccggatatgcaaaccggatagtaaaaccggataggcgcgccatgcttcatcagactct

SEQ ID NO: 7473 - DNA, 172 bp, Artificial Sequence; identical to SEQ ID NO: 7472
  Synthetic polynucleotide

SEQ ID NO: 7474 - DNA, 186 bp, Artificial Sequence
  Synthetic polynucleotide
atcatctcaccttgcctcctgtggtgatcgtctgacgtcctgcaggcatttcccggaaatcacctgagacatttcccggaaatcacctgtcgcatttcccggaaatcacctggaccatttcccggaaatcacctgctacatttcccggaaatcacctgactggcgcgccatgcttcatcagactct

SEQ ID NO: 7475 - DNA, 186 bp, Artificial Sequence; identical to SEQ ID NO: 7474
  Synthetic polynucleotide

SEQ ID NO: 7476 - DNA, 190 bp, Artificial Sequence
  Synthetic polynucleotide
atcatctcaccttgcctcctgcgcgactcatgtacagccctgcaggtcgaaaccgaaactagatcgaaaccgaaacttcgtcgaaaccgaaactgactcgaaaccgaaactctatcgaaaccgaaactacttcgaaaccgaaacttgctcgaaaccgaaactgtaggcgcgccatgcttcatcagactct

SEQ ID NO: 7477 - DNA, 190 bp, Artificial Sequence; identical to SEQ ID NO: 7476
  Synthetic polynucleotide

SEQ ID NO: 7478 - DNA, 196 bp, Artificial Sequence
  Synthetic polynucleotide
atcatctcaccttgcctcctgtagaccaagaccttgaacctgcaggacgacagctgacgagaacgacagctgacgtcgacgacagctgacggacacgacagctgacgctaacgacagctgacgactacgacagctgacgtgcacgacagctgacggtaacgacagctgacgggcgcgccatgcttcatcagactct

SEQ ID NO: 7479 - DNA, 196 bp, Artificial Sequence; identical to SEQ ID NO: 7478
  Synthetic polynucleotide

SEQ ID NO: 7480 - DNA, 196 bp, Artificial Sequence
  Synthetic polynucleotide
atcatctcaccttgcctcctgggatgtcaattcgctagcctgcaggttctagaacgttcagattctagaacgttctcgttctagaacgttcgacttctagaacgttcctattctagaacgttcactttctagaacgttctgcttctagaacgttcgtattctagaacgttcggcgcgccatgcttcatcagactct

SEQ ID NO: 7481 - DNA, 196 bp, Artificial Sequence; identical to SEQ ID NO: 7480
  Synthetic polynucleotide

SEQ ID NO: 7482 - DNA, 200 bp, Artificial Sequence
  Synthetic polynucleotide
atcatctcaccttgcctcctgatcccgagtatactctccctgcaggaggtgtgaatttcacacctagaaggtgtgaatttcacaccttcgaggtgtgaatttcacacctgacaggtgtgaatttcacacctctaaggtgtgaatttcacacctactaggtgtgaatttcacacctggcgcgccatgcttcatcagactct

SEQ ID NO: 7483 - DNA, 200 bp, Artificial Sequence; identical to SEQ ID NO: 7482
  Synthetic polynucleotide

SEQ ID NO: 7484 - DNA, 172 bp, Artificial Sequence
  Synthetic polynucleotide
atcatctcaccttgcctcctgcatactgcccatcaatacctgcaggcccgatttggagacccgatttggtcgcccgatttgggaccccgatttggctacccgatttggactcccgatttggtgccccgatttgggtacccgatttggggcgcgccatgcttcatcagactct

SEQ ID NO: 7485 - DNA, 172 bp, Artificial Sequence; identical to SEQ ID NO: 7484
  Synthetic polynucleotide

SEQ ID NO: 7486 - DNA, 190 bp, Artificial Sequence
  Synthetic polynucleotide
atcatctcaccttgcctcctgatgcctactacgggttacctgcagggcggcacgcgccatagagcggcacgcgccattcggcggcacgcgccatgacgcggcacgcgccatctagcggcacgcgccatactgcggcacgcgccattgcgcggcacgcgccatgtaggcgcgccatgcttcatcagactct

SEQ ID NO: 7487 - DNA, 190 bp, Artificial Sequence; identical to SEQ ID NO: 7486
  Synthetic polynucleotide

SEQ ID NO: 7488 - DNA, 191 bp, Artificial Sequence
  Synthetic polynucleotide
atcatctcaccttgcctcctgattcgctctaatgatcgcctgcaggtgtgaccttttgacctcagatgtgaccttttgacctctcgtgtgaccttttgacctcgactgtgaccttttgacctcctatgtgaccttttgacctcacttgtgaccttttgacctctgcggcgcgccatgcttcatcagactct

SEQ ID NO: 7489 - DNA, 191 bp, Artificial Sequence; identical to SEQ ID NO: 7488
  Synthetic polynucleotide

SEQ ID NO: 7490 - DNA, 190 bp, Artificial Sequence
  Synthetic polynucleotide
atcatctcaccttgcctcctgtcgcatcgccctatttgcctgcaggcccccttgggccccagacccccttgggcccctcgcccccttgggccccgaccccccttgggccccctacccccttgggccccactcccccttgggcccctgccccccttgggccccgtaggcgcgccatgcttcatcagactct

SEQ ID NO: 7491 - DNA, 190 bp, Artificial Sequence; identical to SEQ ID NO: 7490
  Synthetic polynucleotide

SEQ ID NO: 7492 - DNA, 172 bp, Artificial Sequence
  Synthetic polynucleotide
atcatctcaccttgcctcctgcgtagtaagagccggtccctgcaggtattaattatagatattaattattcgtattaattatgactattaattatctatattaattatacttattaattattgctattaattatgtatattaattatggcgcgccatgcttcatcagactct

SEQ ID NO: 7493 - DNA, 172 bp, Artificial Sequence; identical to SEQ ID NO: 7492
  Synthetic polynucleotide

SEQ ID NO: 7494 - DNA, 188 bp, Artificial Sequence
  Synthetic polynucleotide
atcatctcaccttgcctcctgtagccttcgtcgaggtacctgcaggaaccaatcagagagaaaccaatcagagtcgaaccaatcagaggacaaccaatcagagctaaaccaatcagagactaaccaatcagagtgcaaccaatcagaggtaaaccaatcagagggcgcgccatgcttcatcagactct

SEQ ID NO: 7495 - DNA, 188 bp, Artificial Sequence; identical to SEQ ID NO: 7494
  Synthetic polynucleotide

SEQ ID NO: 7496 - DNA, 172 bp, Artificial Sequence
  Synthetic polynucleotide
atcatctcaccttgcctcctgtggaaatacttgggtggcctgcaggtgagtcagcgagatgagtcagcgtcgtgagtcagcggactgagtcagcgctatgagtcagcgacttgagtcagcgtgctgagtcagcggtatgagtcagcgggcgcgccatgcttcatcagactct

SEQ ID NO: 7497 - DNA, 172 bp, Artificial Sequence; identical to SEQ ID NO: 7496
  Synthetic polynucleotide

SEQ ID NO: 7498 - DNA, 191 bp, Artificial Sequence
  Synthetic polynucleotide
atcatctcaccttgcctcctggcattggcgatcactgccctgcaggaatttaagtacttaaaaagaaatttaagtacttaaaatcgaatttaagtacttaaaagacaatttaagtacttaaaactaaatttaagtacttaaaaactaatttaagtacttaaaatgcggcgcgccatgcttcatcagactct

SEQ ID NO: 7499 - DNA, 191 bp, Artificial Sequence; identical to SEQ ID NO: 7498
  Synthetic polynucleotide

SEQ ID NO: 7500 - DNA, 196 bp, Artificial Sequence
  Synthetic polynucleotide
atcatctcaccttgcctcctggctttactactggtccgcctgcaggttccagaggtttcagattccagaggtttctcgttccagaggtttcgacttccagaggtttcctattccagaggtttcactttccagaggtttctgcttccagaggtttcgtattccagaggtttcggcgcgccatgcttcatcagactct

SEQ ID NO: 7501 - DNA, 196 bp, Artificial Sequence; identical to SEQ ID NO: 7500
  Synthetic polynucleotide

SEQ ID NO: 7502 - DNA, 190 bp, Artificial Sequence
  Synthetic polynucleotide
atcatctcaccttgcctcctgtccttcccggagattcccctgcagggcgccccctggtggagagcgccccctggtggtcggcgccccctggtgggacgcgccccctggtggctagcgccccctggtggactgcgccccctggtggtgcgcgccccctggtgggtaggcgcgccatgcttcatcagactct

SEQ ID NO: 7503 - DNA, 190 bp, Artificial Sequence; identical to SEQ ID NO: 7502
  Synthetic polynucleotide

SEQ ID NO: 7504 - DNA, 197 bp, Artificial Sequence
  Synthetic polynucleotide
atcatctcaccttgcctcctgtcgtccttcgcagtcgacctgcaggagggggcggggccaaagaagggggcggggccaatcgagggggcggggccaagacagggggcggggccaactaagggggcggggccaaactagggggcggggccaatgcagggggcggggccaagtaggcgcgccatgcttcatcagactct

SEQ ID NO: 7505 - DNA, 197 bp, Artificial Sequence; identical to SEQ ID NO: 7504
  Synthetic polynucleotide

SEQ ID NO: 7506 - DNA, 180 bp, Artificial Sequence
  Synthetic polynucleotide
atcatctcaccttgcctcctggtgcagaagcactcgaccctgcagggccacttccggagagccacttccggtcggccacttccgggacgccacttccggctagccacttccggactgccacttccggtgcgccacttccgggtagccacttccggggcgcgccatgcttcatcagactct

SEQ ID NO: 7507 - DNA, 180 bp, Artificial Sequence; identical to SEQ ID NO: 7506
  Synthetic polynucleotide

SEQ ID NO: 7508 - DNA, 185 bp, Artificial Sequence
  Synthetic polynucleotide
atcatctcaccttgcctcctgaaagtcgagccgcgtagcctgcaggtgcaactaattaattcagatgcaactaattaattctcgtgcaactaattaattcgactgcaactaattaattcctatgcaactaattaattcacttgcaactaattaattctgcggcgcgccatgcttcatcagactct

SEQ ID NO: 7509 - DNA, 185 bp, Artificial Sequence; identical to SEQ ID NO: 7508
  Synthetic polynucleotide

SEQ ID NO: 7510 - DNA, 190 bp, Artificial Sequence
  Synthetic polynucleotide
atcatctcaccttgcctcctgctttgcgttgacctgatcctgcaggttggtattgtggttagattggtattgtggtttcgttggtattgtggttgacttggtattgtggttctattggtattgtggttactttggtattgtggtttgcttggtattgtggttgtaggcgcgccatgcttcatcagactct

SEQ ID NO: 7511 - DNA, 190 bp, Artificial Sequence; identical to SEQ ID NO: 7510
  Synthetic polynucleotide

SEQ ID NO: 7512 - DNA, 156 bp, Artificial Sequence
  Synthetic polynucleotide
atcatctcaccttgcctcctggctactttatccgctctcctgcaggcctttgttagacctttgtttcgcctttgttgaccctttgttctacctttgttactcctttgtttgccctttgttgtacctttgttggcgcgccatgcttcatcagactct

SEQ ID NO: 7513 - DNA, 156 bp, Artificial Sequence; identical to SEQ ID NO: 7512
  Synthetic polynucleotide

SEQ ID NO: 7514 - DNA, 196 bp, Artificial Sequence
  Synthetic polynucleotide
atcatctcaccttgcctcctgcggttccaggaactcttcctgcaggagggacagctgcaagaagggacagctgcatcgagggacagctgcagacagggacagctgcactaagggacagctgcaactagggacagctgcatgcagggacagctgcagtaagggacagctgcaggcgcgccatgcttcatcagactct

SEQ ID NO: 7515 - DNA, 196 bp, Artificial Sequence; identical to SEQ ID NO: 7514
  Synthetic polynucleotide

SEQ ID NO: 7516 - DNA, 197 bp, Artificial Sequence
  Synthetic polynucleotide
atcatctcaccttgcctcctgcaatgctagcgtttagacctgcaggtgacctttagttgaccttagatgacctttagttgacctttcgtgacctttagttgaccttgactgacctttagttgaccttctatgacctttagttgaccttacttgacctttagttgacctttgcggcgcgccatgcttcatcagactct

SEQ ID NO: 7517 - DNA, 197 bp, Artificial Sequence; identical to SEQ ID NO: 7516
  Synthetic polynucleotide

SEQ ID NO: 7518 - DNA, 156 bp, Artificial Sequence
  Synthetic polynucleotide
atcatctcaccttgcctcctgcttaggtacgtgcccttcctgcaggacacgtgaagaacacgtgatcgacacgtgagacacacgtgactaacacgtgaactacacgtgatgcacacgtgagtaacacgtgaggcgcgccatgcttcatcagactct

SEQ ID NO: 7519 - DNA, 156 bp, Artificial Sequence; identical to SEQ ID NO: 7518
  Synthetic polynucleotide

SEQ ID NO: 7520 - DNA, 197 bp, Artificial Sequence
  Synthetic polynucleotide
atcatctcaccttgcctcctgtccgttactcgaagatgcctgcaggcacatcaatcaaattagacacatcaatcaaatttcgcacatcaatcaaattgaccacatcaatcaaattctacacatcaatcaaattactcacatcaatcaaatttgccacatcaatcaaattgtaggcgcgccatgcttcatcagactct

SEQ ID NO: 7521 - DNA, 197 bp, Artificial Sequence; identical to SEQ ID NO: 7520
  Synthetic polynucleotide

SEQ ID NO: 7522 - DNA, 196 bp, Artificial Sequence
  Synthetic polynucleotide
atcatctcaccttgcctcctgtttatgcacagcttatgcctgcaggccacctgttgcacagaccacctgttgcactcgccacctgttgcacgacccacctgttgcacctaccacctgttgcacactccacctgttgcactgcccacctgttgcacgtaccacctgttgcacggcgcgccatgcttcatcagactct

SEQ ID NO: 7523 - DNA, 196 bp, Artificial Sequence; identical to SEQ ID NO: 7522
  Synthetic polynucleotide

SEQ ID NO: 7524 - DNA, 180 bp, Artificial Sequence
  Synthetic polynucleotide
atcatctcaccttgcctcctggtcggaggtttgccgttcctgcagggctcgtaaaaaagagctcgtaaaaatcggctcgtaaaaagacgctcgtaaaaactagctcgtaaaaaactgctcgtaaaaatgcgctcgtaaaaagtagctcgtaaaaaggcgcgccatgcttcatcagactct

SEQ ID NO: 7525 - DNA, 180 bp, Artificial Sequence; identical to SEQ ID NO: 7524
  Synthetic polynucleotide

SEQ ID NO: 7526 - DNA, 197 bp, Artificial Sequence
  Synthetic polynucleotide
atcatctcaccttgcctcctgttgacgtcgtattgcagcctgcaggagggggcggggccagagaagggggcggggccagtcgagggggcggggccaggacagggggcggggccagctaagggggcggggccagactagggggcggggccagtgcagggggcggggccaggtaggcgcgccatgcttcatcagactct

SEQ ID NO: 7527 - DNA, 197 bp, Artificial Sequence; identical to SEQ ID NO: 7526
  Synthetic polynucleotide

SEQ ID NO: 7528 - DNA, 196 bp, Artificial Sequence
  Synthetic polynucleotide
atcatctcaccttgcctcctggggtcagtagttggttgcctgcaggcccccgcccccgcagacccccgcccccgctcgcccccgcccccgcgaccccccgcccccgcctacccccgcccccgcactcccccgcccccgctgccccccgcccccgcgtacccccgcccccgcggcgcgccatgcttcatcagactct

SEQ ID NO: 7529 - DNA, 196 bp, Artificial Sequence; identical to SEQ ID NO: 7528
  Synthetic polynucleotide

SEQ ID NO: 7530 - DNA, 180 bp, Artificial Sequence
  Synthetic polynucleotide
atcatctcaccttgcctcctgacagctacgctgcatagcctgcagggctcgtaaaacagagctcgtaaaactcggctcgtaaaacgacgctcgtaaaacctagctcgtaaaacactgctcgtaaaactgcgctcgtaaaacgtagctcgtaaaacggcgcgccatgcttcatcagactct

SEQ ID NO: 7531 - DNA, 180 bp, Artificial Sequence; identical to SEQ ID NO: 7530
  Synthetic polynucleotide

SEQ ID NO: 7532 - DNA, 164 bp, Artificial Sequence
  Synthetic polynucleotide
atcatctcaccttgcctcctgtctaaccagctaggttacctgcaggaaagtccccagaaaagtcccctcgaaagtccccgacaaagtccccctaaaagtccccactaaagtcccctgcaaagtccccgtaaaagtccccggcgcgccatgcttcatcagactct

SEQ ID NO: 7533 - DNA, 164 bp, Artificial Sequence; identical to SEQ ID NO: 7532
  Synthetic polynucleotide

SEQ ID NO: 7534 - DNA, 172 bp, Artificial Sequence
  Synthetic polynucleotide
atcatctcaccttgcctcctgcgggtgcttagagcttgcctgcaggcggccgacgcagacggccgacgctcgcggccgacgcgaccggccgacgcctacggccgacgcactcggccgacgctgccggccgacgcgtacggccgacgcggcgcgccatgcttcatcagactct

SEQ ID NO: 7535 - DNA, 172 bp, Artificial Sequence; identical to SEQ ID NO: 7534
  Synthetic polynucleotide

SEQ ID NO: 7536 - DNA, 156 bp, Artificial Sequence
  Synthetic polynucleotide
atcatctcaccttgcctcctgcctgattaaagcttagacctgcaggacacgtgcagaacacgtgctcgacacgtgcgacacacgtgcctaacacgtgcactacacgtgctgcacacgtgcgtaacacgtgcggcgcgccatgcttcatcagactct

SEQ ID NO: 7537 - DNA, 156 bp, Artificial Sequence; identical to SEQ ID NO: 7536
  Synthetic polynucleotide

SEQ ID NO: 7538 - DNA, 191 bp, Artificial Sequence
  Synthetic polynucleotide
atcatctcaccttgcctcctggataagccctctaaggacctgcaggcctcacttccgggttcgagacctcacttccgggttcgtcgcctcacttccgggttcggaccctcacttccgggttcgctacctcacttccgggttcgactcctcacttccgggttcgtgcggcgcgccatgcttcatcagactct

SEQ ID NO: 7539 - DNA, 191 bp, Artificial Sequence; identical to SEQ ID NO: 7538
  Synthetic polynucleotide

SEQ ID NO: 7540 - DNA, 191 bp, Artificial Sequence
  Synthetic polynucleotide
atcatctcaccttgcctcctggtgagctagcgagatcccctgcaggtgaccttgactgacctaagatgaccttgactgacctatcgtgaccttgactgacctagactgaccttgactgacctactatgaccttgactgacctaacttgaccttgactgacctatgcggcgcgccatgcttcatcagactct

SEQ ID NO: 7541 - DNA, 191 bp, Artificial Sequence; identical to SEQ ID NO: 7540
  Synthetic polynucleotide

SEQ ID NO: 7542 - DNA, 180 bp, Artificial Sequence
  Synthetic polynucleotide
atcatctcaccttgcctcctgaagcatcagtcaggagccctgcaggcctcccgcccgagacctcccgcccgtcgcctcccgcccggaccctcccgcccgctacctcccgcccgactcctcccgcccgtgccctcccgcccggtacctcccgcccgggcgcgccatgcttcatcagactct

SEQ ID NO: 7543 - DNA, 180 bp, Artificial Sequence; identical to SEQ ID NO: 7542
  Synthetic polynucleotide

SEQ ID NO: 7544 - DNA, 172 bp, Artificial Sequence
  Synthetic polynucleotide
atcatctcaccttgcctcctgatagtacacctttctgacctgcaggctaattaagaagactaattaagatcgctaattaagagacctaattaagactactaattaagaactctaattaagatgcctaattaagagtactaattaagaggcgcgccatgcttcatcagactct

SEQ ID NO: 7545 - DNA, 172 bp, Artificial Sequence; identical to SEQ ID NO: 7544
  Synthetic polynucleotide

SEQ ID NO: 7546 - DNA, 180 bp, Artificial Sequence
  Synthetic polynucleotide
atcatctcaccttgcctcctgttcaccacctatacctgcctgcaggtggaaatccccagatggaaatcccctcgtggaaatccccgactggaaatccccctatggaaatccccacttggaaatcccctgctggaaatccccgtatggaaatccccggcgcgccatgcttcatcagactct

SEQ ID NO: 7547 - DNA, 180 bp, Artificial Sequence; identical to SEQ ID NO: 7546
  Synthetic polynucleotide

SEQ ID NO: 7548 - DNA, 197 bp, Artificial Sequence
  Synthetic polynucleotide
atcatctcaccttgcctcctgaagcaaggcccacaatacctgcaggcattagcatgacaatagacattagcatgacaattcgcattagcatgacaatgaccattagcatgacaatctacattagcatgacaatactcattagcatgacaattgccattagcatgacaatgtaggcgcgccatgcttcatcagactct

SEQ ID NO: 7549 - DNA, 197 bp, Artificial Sequence; identical to SEQ ID NO: 7548
  Synthetic polynucleotide

SEQ ID NO: 7550 - DNA, 190 bp, Artificial Sequence
  Synthetic polynucleotide
atcatctcaccttgcctcctgtaagccttgtccgggcacctgcagggggtcacgtggccgagagggtcacgtggccgtcggggtcacgtggccggacgggtcacgtggccgctagggtcacgtggccgactgggtcacgtggccgtgcgggtcacgtggccggtaggcgcgccatgcttcatcagactct

SEQ ID NO: 7551 - DNA, 190 bp, Artificial Sequence; identical to SEQ ID NO: 7550
  Synthetic polynucleotide

SEQ ID NO: 7552 - DNA, 191 bp, Artificial Sequence
  Synthetic polynucleotide
atcatctcaccttgcctcctgatgtagtttgaacccatcctgcaggaaaaatgataccccatcagaaaaaatgataccccatctcgaaaaatgataccccatcgacaaaaatgataccccatcctaaaaaatgataccccatcactaaaaatgataccccatctgcggcgcgccatgcttcatcagactct

SEQ ID NO: 7553 - DNA, 191 bp, Artificial Sequence; identical to SEQ ID NO: 7552
  Synthetic polynucleotide

SEQ ID NO: 7554 - DNA, 156 bp, Artificial Sequence
  Synthetic polynucleotide
atcatctcaccttgcctcctgtcaccacgttggtcttacctgcaggcggattaaagacggattaatcgcggattaagaccggattaactacggattaaactcggattaatgccggattaagtacggattaaggcgcgccatgcttcatcagactct

SEQ ID NO: 7555 - DNA, 156 bp, Artificial Sequence; identical to SEQ ID NO: 7554
  Synthetic polynucleotide

SEQ ID NO: 7556 - DNA, 164 bp, Artificial Sequence
  Synthetic polynucleotide
atcatctcaccttgcctcctgcactgtggccaaactgacctgcaggtgtaaacaaagatgtaaacaatcgtgtaaacaagactgtaaacaactatgtaaacaaacttgtaaacaatgctgtaaacaagtatgtaaacaaggcgcgccatgcttcatcagactct

SEQ ID NO: 7557 - DNA, 164 bp, Artificial Sequence; identical to SEQ ID NO: 7556
  Synthetic polynucleotide

SEQ ID NO: 7558 - DNA, 148 bp, Artificial Sequence
  Synthetic polynucleotide
atcatctcaccttgcctcctgagagccctaattgctggcctgcaggatacttaagaatacttatcgatacttagacatacttactaatacttaactatacttatgcatacttagtaatacttaggcgcgccatgcttcatcagactct

SEQ ID NO: 7559 - DNA, 148 bp, Artificial Sequence; identical to SEQ ID NO: 7558
  Synthetic polynucleotide

SEQ ID NO: 7560 - DNA, 200 bp, Artificial Sequence
  Synthetic polynucleotide
atcatctcaccttgcctcctggattatagtggtaagcccctgcaggaggtgtgaaattcacacctagaaggtgtgaaattcacaccttcgaggtgtgaaattcacacctgacaggtgtgaaattcacacctctaaggtgtgaaattcacacctactaggtgtgaaattcacacctggcgcgccatgcttcatcagactct

SEQ ID NO: 7561 - DNA, 200 bp, Artificial Sequence; identical to SEQ ID NO: 7560
  Synthetic polynucleotide

SEQ ID NO: 7562 - DNA, 164 bp, Artificial Sequence
  Synthetic polynucleotide
atcatctcaccttgcctcctggcatataatgaaggacccctgcaggcttaattagagacttaattagtcgcttaattaggaccttaattagctacttaattagactcttaattagtgccttaattaggtacttaattagggcgcgccatgcttcatcagactct

SEQ ID NO: 7563 - DNA, 164 bp, Artificial Sequence; identical to SEQ ID NO: 7562
  Synthetic polynucleotide

SEQ ID NO: 7564 - DNA, 191 bp, Artificial Sequence
  Synthetic polynucleotide
atcatctcaccttgcctcctgcaaagagtctaccatgtcctgcaggtgaccttgactgaccttagatgaccttgactgacctttcgtgaccttgactgaccttgactgaccttgactgaccttctatgaccttgactgaccttacttgaccttgactgacctttgcggcgcgccatgcttcatcagactct

SEQ ID NO: 7565 - DNA, 191 bp, Artificial Sequence; identical to SEQ ID NO: 7564
  Synthetic polynucleotide

SEQ ID NO: 7566 - DNA, 164 bp, Artificial Sequence
  Synthetic polynucleotide
atcatctcaccttgcctcctgaagttctagagttcgttcctgcaggatcaatcaaagaatcaatcaatcgatcaatcaagacatcaatcaactaatcaatcaaactatcaatcaatgcatcaatcaagtaatcaatcaaggcgcgccatgcttcatcagactct

SEQ ID NO: 7567 - DNA, 164 bp, Artificial Sequence; identical to SEQ ID NO: 7566
  Synthetic polynucleotide

SEQ ID NO: 7568 - DNA, 196 bp, Artificial Sequence
  Synthetic polynucleotide
atcatctcaccttgcctcctgaagtttaagcgggataacctgcaggcatttcccggaagagacatttcccggaagtcgcatttcccggaaggaccatttcccggaagctacatttcccggaagactcatttcccggaagtgccatttcccggaaggtacatttcccggaagggcgcgccatgcttcatcagactct

SEQ ID NO: 7569 - DNA, 196 bp, Artificial Sequence; identical to SEQ ID NO: 7568
  Synthetic polynucleotide

SEQ ID NO: 7570 - DNA, 185 bp, Artificial Sequence
  Synthetic polynucleotide
atcatctcaccttgcctcctgtaggccatatgtccgtacctgcaggtttcctaatcaggtaaagatttcctaatcaggtaatcgtttcctaatcaggtaagactttcctaatcaggtaactatttcctaatcaggtaaacttttcctaatcaggtaatgcggcgcgccatgcttcatcagactct

SEQ ID NO: 7571 - DNA, 185 bp, Artificial Sequence; identical to SEQ ID NO: 7570
  Synthetic polynucleotide

SEQ ID NO: 7572 - DNA, 197 bp, Artificial Sequence
  Synthetic polynucleotide
atcatctcaccttgcctcctgatttatcgatgtatgcgcctgcaggtgacctttgccctacagatgacctttgccctactcgtgacctttgccctacgactgacctttgccctacctatgacctttgccctacacttgacctttgccctactgctgacctttgccctacgtaggcgcgccatgcttcatcagactct

SEQ ID NO: 7573 - DNA, 197 bp, Artificial Sequence; identical to SEQ ID NO: 7572
  Synthetic polynucleotide

SEQ ID NO: 7574 - DNA, 156 bp, Artificial Sequence
  Synthetic polynucleotide
atcatctcaccttgcctcctgacgttcatccgagctaacctgcaggacacgtggagaacacgtggtcgacacgtgggacacacgtggctaacacgtggactacacgtggtgcacacgtgggtaacacgtggggcgcgccatgcttcatcagactct

SEQ ID NO: 7575 - DNA, 156 bp, Artificial Sequence; identical to SEQ ID NO: 7574
  Synthetic polynucleotide

SEQ ID NO: 7576 - DNA, 185 bp, Artificial Sequence
  Synthetic polynucleotide
atcatctcaccttgcctcctgcgaatccgtggtacgaccctgcagggcagtaagaagtatacagagcagtaagaagtatactcggcagtaagaagtatacgacgcagtaagaagtatacctagcagtaagaagtatacactgcagtaagaagtatactgcggcgcgccatgcttcatcagactct

SEQ ID NO: 7577 - DNA, 185 bp, Artificial Sequence; identical to SEQ ID NO: 7576
  Synthetic polynucleotide

SEQ ID NO: 7578 - DNA, 185 bp, Artificial Sequence
  Synthetic polynucleotide
atcatctcaccttgcctcctgcatgtcccgttgcacgtcctgcagggtgaccttttgacctcagagtgaccttttgacctctcggtgaccttttgacctcgacgtgaccttttgacctcctagtgaccttttgacctcactgtgaccttttgacctctgcggcgcgccatgcttcatcagactct

SEQ ID NO: 7579 - DNA, 185 bp, Artificial Sequence; identical to SEQ ID NO: 7578
  Synthetic polynucleotide

SEQ ID NO: 7580 - DNA, 180 bp, Artificial Sequence
  Synthetic polynucleotide
atcatctcaccttgcctcctgagtacctatgaagatgtcctgcagggtttggcgcgaagagtttggcgcgatcggtttggcgcgagacgtttggcgcgactagtttggcgcgaactgtttggcgcgatgcgtttggcgcgagtagtttggcgcgaggcgcgccatgcttcatcagactct

SEQ ID NO: 7581 - DNA, 180 bp, Artificial Sequence; identical to SEQ ID NO: 7580
  Synthetic polynucleotide

SEQ ID NO: 7582 - DNA, 197 bp, Artificial Sequence
  Synthetic polynucleotide
atcatctcaccttgcctcctggagtgaatttgattgtgcctgcaggataaaccgaaaccaaagaataaaccgaaaccaatcgataaaccgaaaccaagacataaaccgaaaccaactaataaaccgaaaccaaactataaaccgaaaccaatgcataaaccgaaaccaagtaggcgcgccatgcttcatcagactct

SEQ ID NO: 7583 - DNA, 197 bp, Artificial Sequence; identical to SEQ ID NO: 7582
  Synthetic polynucleotide

SEQ ID NO: 7584 - DNA, 164 bp, Artificial Sequence
  Synthetic polynucleotide
atcatctcaccttgcctcctggcaggagccatatgatgcctgcaggggtaataaaagaggtaataaatcgggtaataaagacggtaataaactaggtaataaaactggtaataaatgcggtaataaagtaggtaataaaggcgcgccatgcttcatcagactct

SEQ ID NO: 7585 - DNA, 164 bp, Artificial Sequence; identical to SEQ ID NO: 7584
  Synthetic polynucleotide

SEQ ID NO: 7586 - DNA, 185 bp, Artificial Sequence
  Synthetic polynucleotide
atcatctcaccttgcctcctgggcattggtcactactgcctgcaggtattggtaattaccttagatattggtaattacctttcgtattggtaattaccttgactattggtaattaccttctatattggtaattaccttacttattggtaattacctttgcggcgcgccatgcttcatcagactct

SEQ ID NO: 7587 - DNA, 185 bp, Artificial Sequence; identical to SEQ ID NO: 7586
  Synthetic polynucleotide

SEQ ID NO: 7588 - DNA, 164 bp, Artificial Sequence
  Synthetic polynucleotide
atcatctcaccttgcctcctgattactaggcacgcagccctgcaggcccccgggcagacccccgggctcgcccccgggcgaccccccgggcctacccccgggcactcccccgggctgccccccgggcgtacccccgggcggcgcgccatgcttcatcagactct

SEQ ID NO: 7589 - DNA, 164 bp, Artificial Sequence; identical to SEQ ID NO: 7588
  Synthetic polynucleotide

SEQ ID NO: 7590 - DNA, 156 bp, Artificial Sequence
  Synthetic polynucleotide
atcatctcaccttgcctcctggtcattgcccgaacactcctgcaggataaacaaagaataaacaatcgataaacaagacataaacaactaataaacaaactataaacaatgcataaacaagtaataaacaaggcgcgccatgcttcatcagactct

SEQ ID NO: 7591 - DNA, 156 bp, Artificial Sequence; identical to SEQ ID NO: 7590
  Synthetic polynucleotide

SEQ ID NO: 7592 - DNA, 190 bp, Artificial Sequence
  Synthetic polynucleotide
atcatctcaccttgcctcctgagtttattgttgccgtacctgcaggctctgattggctggagactctgattggctggtcgctctgattggctgggacctctgattggctggctactctgattggctggactctctgattggctggtgcctctgattggctgggtaggcgcgccatgcttcatcagactct

SEQ ID NO: 7593 - DNA, 190 bp, Artificial Sequence; identical to SEQ ID NO: 7592
  Synthetic polynucleotide

SEQ ID NO: 7594 - DNA, 156 bp, Artificial Sequence
  Synthetic polynucleotide
atcatctcaccttgcctcctgagagtgatctgcgggttcctgcaggctggttaaagactggttaatcgctggttaagacctggttaactactggttaaactctggttaatgcctggttaagtactggttaaggcgcgccatgcttcatcagactct

SEQ ID NO: 7595 - DNA, 156 bp, Artificial Sequence; identical to SEQ ID NO: 7594
  Synthetic polynucleotide

SEQ ID NO: 7596 - DNA, 191 bp, Artificial Sequence
  Synthetic polynucleotide
atcatctcaccttgcctcctgatctcgctccgtcctgtcctgcagggggggcacgtggcattaagagggggcacgtggcattatcggggggcacgtggcattagacgggggcacgtggcattactagggggcacgtggcattaactgggggcacgtggcattatgcggcgcgccatgcttcatcagactct

SEQ ID NO: 7597 - DNA, 191 bp, Artificial Sequence; identical to SEQ ID NO: 7596
  Synthetic polynucleotide

SEQ ID NO: 7598 - DNA, 172 bp, Artificial Sequence
  Synthetic polynucleotide
atcatctcaccttgcctcctgacgggttggcaactgtgcctgcaggaagtaggtcaagaaagtaggtcatcgaagtaggtcagacaagtaggtcactaaagtaggtcaactaagtaggtcatgcaagtaggtcagtaaagtaggtcaggcgcgccatgcttcatcagactct

SEQ ID NO: 7599 - DNA, 172 bp, Artificial Sequence; identical to SEQ ID NO: 7598
  Synthetic polynucleotide

SEQ ID NO: 7600 - DNA, 191 bp, Artificial Sequence
  Synthetic polynucleotide
atcatctcaccttgcctcctggcagcacatatagacaacctgcaggcagtttcggtttccgtttcccagacagtttcggtttccgtttccctcgcagtttcggtttccgtttcccgaccagtttcggtttccgtttcccctacagtttcggtttccgtttcccactggcgcgccatgcttcatcagactct

SEQ ID NO: 7601 - DNA, 191 bp, Artificial Sequence; identical to SEQ ID NO: 7600
  Synthetic polynucleotide

SEQ ID NO: 7602 - DNA, 172 bp, Artificial Sequence
  Synthetic polynucleotide
atcatctcaccttgcctcctgcgaatcttcgagtcaaacctgcagggcaatatcgaagagcaatatcgatcggcaatatcgagacgcaatatcgactagcaatatcgaactgcaatatcgatgcgcaatatcgagtagcaatatcgaggcgcgccatgcttcatcagactct

SEQ ID NO: 7603 - DNA, 172 bp, Artificial Sequence; identical to SEQ ID NO: 7602
  Synthetic polynucleotide

SEQ ID NO: 7604 - DNA, 197 bp, Artificial Sequence
  Synthetic polynucleotide
atcatctcaccttgcctcctgcagaaagccggatagtgcctgcaggtttgtttacttagggagatttgtttacttagggtcgtttgtttacttaggggactttgtttacttagggctatttgtttacttagggacttttgtttacttagggtgctttgtttacttaggggtaggcgcgccatgcttcatcagactct

SEQ ID NO: 7605 - DNA, 197 bp, Artificial Sequence; identical to SEQ ID NO: 7604
  Synthetic polynucleotide

SEQ ID NO: 7606 - DNA, 191 bp, Artificial Sequence
  Synthetic polynucleotide
atcatctcaccttgcctcctgggcgcgggcataaataacctgcaggtgacctttcgtgaccttagatgacctttcgtgacctttcgtgacctttcgtgaccttgactgacctttcgtgaccttctatgacctttcgtgaccttacttgacctttcgtgacctttgcggcgcgccatgcttcatcagactct

SEQ ID NO: 7607 - DNA, 191 bp, Artificial Sequence; identical to SEQ ID NO: 7606
  Synthetic polynucleotide

SEQ ID NO: 7608 - DNA, 191 bp, Artificial Sequence
  Synthetic polynucleotide
atcatctcaccttgcctcctgttcggacggtcagactccctgcagggggaacacggtgtacccagagggaacacggtgtaccctcggggaacacggtgtacccgacgggaacacggtgtacccctagggaacacggtgtacccactgggaacacggtgtaccctgcggcgcgccatgcttcatcagactct

SEQ ID NO: 7609 - DNA, 191 bp, Artificial Sequence; identical to SEQ ID NO: 7608
  Synthetic polynucleotide

SEQ ID NO: 7610 - DNA, 186 bp, Artificial Sequence
  Synthetic polynucleotide
atcatctcaccttgcctcctgctgttgtacggagcgagcctgcagggcggacgttgcaacgtccgcagagcggacgttgcaacgtccgctcggcggacgttgcaacgtccgcgacgcggacgttgcaacgtccgcctagcggacgttgcaacgtccgcactggcgcgccatgcttcatcagactct

SEQ ID NO: 7611 - DNA, 186 bp, Artificial Sequence; identical to SEQ ID NO: 7610
  Synthetic polynucleotide

SEQ ID NO: 7612 - DNA, 198 bp, Artificial Sequence
  Synthetic polynucleotide
atcatctcaccttgcctcctggcgacaagaaatagacccctgcaggttaatcggttgctaagggtcacaagattaatcggttgctaagggtcacatcgttaatcggttgctaagggtcacagacttaatcggttgctaagggtcacactattaatcggttgctaagggtcacaggcgcgccatgcttcatcagactct

SEQ ID NO: 7613 - DNA, 198 bp, Artificial Sequence; identical to SEQ ID NO: 7612
  Synthetic polynucleotide

SEQ ID NO: 7614 - DNA, 172 bp, Artificial Sequence
  Synthetic polynucleotide
atcatctcaccttgcctcctggagagtagttccggaatcctgcaggtttcacacctagatttcacaccttcgtttcacacctgactttcacacctctatttcacacctacttttcacaccttgctttcacacctgtatttcacacctggcgcgccatgcttcatcagactct

SEQ ID NO: 7615 - DNA, 172 bp, Artificial Sequence; identical to SEQ ID NO: 7614
  Synthetic polynucleotide

SEQ ID NO: 7616 - DNA, 156 bp, Artificial Sequence
  Synthetic polynucleotide
atcatctcaccttgcctcctgaggtccgtatcattgaacctgcaggtgacctctagatgacctcttcgtgacctctgactgacctctctatgacctctacttgacctcttgctgacctctgtatgacctctggcgcgccatgcttcatcagactct

SEQ ID NO: 7617 - DNA, 156 bp, Artificial Sequence; identical to SEQ ID NO: 7616
  Synthetic polynucleotide

SEQ ID NO: 7618 - DNA, 191 bp, Artificial Sequence
  Synthetic polynucleotide
atcatctcaccttgcctcctgtaaacacgtggagacaacctgcaggttccctagaacactctgtacccgcaacagattccctagaacactctgtacccgcaactcgttccctagaacactctgtacccgcaacgacttccctagaacactctgtacccgcaacctaggcgcgccatgcttcatcagactct

SEQ ID NO: 7619 - DNA, 191 bp, Artificial Sequence; identical to SEQ ID NO: 7618
  Synthetic polynucleotide

SEQ ID NO: 7620 - DNA, 185 bp, Artificial Sequence
  Synthetic polynucleotide
atcatctcaccttgcctcctgaggagttacatgtgggccctgcaggcccgaccacgtggtcaagacccgaccacgtggtcatcgcccgaccacgtggtcagaccccgaccacgtggtcactacccgaccacgtggtcaactcccgaccacgtggtcatgcggcgcgccatgcttcatcagactct

SEQ ID NO: 7621 - DNA, 185 bp, Artificial Sequence; identical to SEQ ID NO: 7620
  Synthetic polynucleotide

SEQ ID NO: 7622 - DNA, 191 bp, Artificial Sequence
  Synthetic polynucleotide
atcatctcaccttgcctcctgcgagcgtttgcatggcacctgcaggtcccagctactttgggaagatcccagctactttgggatcgtcccagctactttgggagactcccagctactttgggactatcccagctactttgggaacttcccagctactttgggatgcggcgcgccatgcttcatcagactct

SEQ ID NO: 7623 - DNA, 191 bp, Artificial Sequence; identical to SEQ ID NO: 7622
  Synthetic polynucleotide

SEQ ID NO: 7624 - DNA, 185 bp, Artificial Sequence
  Synthetic polynucleotide
atcatctcaccttgcctcctggcacgcatctcatctcacctgcaggatgtacagtagcaaagagaatgtacagtagcaaagtcgatgtacagtagcaaaggacatgtacagtagcaaagctaatgtacagtagcaaagactatgtacagtagcaaagtgcggcgcgccatgcttcatcagactct

SEQ ID NO: 7625 - DNA, 185 bp, Artificial Sequence; identical to SEQ ID NO: 7624
  Synthetic polynucleotide

SEQ ID NO: 7626 - DNA, 180 bp, Artificial Sequence
  Synthetic polynucleotide
atcatctcaccttgcctcctgctggtatagtgtatgcgcctgcaggaaaaacaaacaagaaaaaacaaacatcgaaaaacaaacagacaaaaacaaacactaaaaaacaaacaactaaaaacaaacatgcaaaaacaaacagtaaaaaacaaacaggcgcgccatgcttcatcagactct

SEQ ID NO: 7627 - DNA, 180 bp, Artificial Sequence; identical to SEQ ID NO: 7626
  Synthetic polynucleotide

SEQ ID NO: 7628 - DNA, 156 bp, Artificial Sequence
  Synthetic polynucleotide
atcatctcaccttgcctcctgcgtggtcgatttcccatcctgcagggtaattatagagtaattattcggtaattatgacgtaattatctagtaattatactgtaattattgcgtaattatgtagtaattatggcgcgccatgcttcatcagactct

SEQ ID NO: 7629 - DNA, 156 bp, Artificial Sequence; identical to SEQ ID NO: 7628
  Synthetic polynucleotide

SEQ ID NO: 7630 - DNA, 164 bp, Artificial Sequence
  Synthetic polynucleotide
atcatctcaccttgcctcctgactcagggcgtgagtgacctgcaggaaagtccaaagaaaagtccaatcgaaagtccaagacaaagtccaactaaaagtccaaactaaagtccaatgcaaagtccaagtaaaagtccaaggcgcgccatgcttcatcagactct

SEQ ID NO: 7631 - DNA, 164 bp, Artificial Sequence; identical to SEQ ID NO: 7630
  Synthetic polynucleotide

SEQ ID NO: 7632 - DNA, 172 bp, Artificial Sequence
  Synthetic polynucleotide
atcatctcaccttgcctcctgcgcacataaggacaagccctgcaggcataaacaaaagacataaacaaatcgcataaacaaagaccataaacaaactacataaacaaaactcataaacaaatgccataaacaaagtacataaacaaaggcgcgccatgcttcatcagactct

SEQ ID NO: 7633 - DNA, 172 bp, Artificial Sequence; identical to SEQ ID NO: 7632
  Synthetic polynucleotide

SEQ ID NO: 7634 - DNA, 191 bp, Artificial Sequence
  Synthetic polynucleotide
atcatctcaccttgcctcctgacaccagcgacgaattacctgcaggttccactaattagtgcaagattccactaattagtgcatcgttccactaattagtgcagacttccactaattagtgcactattccactaattagtgcaactttccactaattagtgcatgcggcgcgccatgcttcatcagactct

SEQ ID NO: 7635 - DNA, 191 bp, Artificial Sequence; identical to SEQ ID NO: 7634
  Synthetic polynucleotide

SEQ ID NO: 7636 - DNA, 190 bp, Artificial Sequence
  Synthetic polynucleotide
atcatctcaccttgcctcctggccttcagacgtctccacctgcaggtatgtaaacaacaaagatatgtaaacaacaatcgtatgtaaacaacaagactatgtaaacaacaactatatgtaaacaacaaacttatgtaaacaacaatgctatgtaaacaacaagtaggcgcgccatgcttcatcagactct

SEQ ID NO: 7637 - DNA, 190 bp, Artificial Sequence; identical to SEQ ID NO: 7636
  Synthetic polynucleotide

SEQ ID NO: 7638 - DNA, 196 bp, Artificial Sequence
  Synthetic polynucleotide
atcatctcaccttgcctcctgaaggcagctcatcagatcctgcaggcaacatctggattagacaacatctggatttcgcaacatctggattgaccaacatctggattctacaacatctggattactcaacatctggatttgccaacatctggattgtacaacatctggattggcgcgccatgcttcatcagactct

SEQ ID NO: 7639 - DNA, 196 bp, Artificial Sequence; identical to SEQ ID NO: 7638
  Synthetic polynucleotide

SEQ ID NO: 7640 - DNA, 180 bp, Artificial Sequence
  Synthetic polynucleotide
atcatctcaccttgcctcctgaccgaaccctaaggtgccctgcaggccagggggcgcagaccagggggcgctcgccagggggcgcgacccagggggcgcctaccagggggcgcactccagggggcgctgcccagggggcgcgtaccagggggcgcggcgcgccatgcttcatcagactct

SEQ ID NO: 7641 - DNA, 180 bp, Artificial Sequence; identical to SEQ ID NO: 7640
  Synthetic polynucleotide

SEQ ID NO: 7642 - DNA, 185 bp, Artificial Sequence
  Synthetic polynucleotide
atcatctcaccttgcctcctgcttggctgtaatcgatgcctgcagggaattaattagttgcaagagaattaattagttgcatcggaattaattagttgcagacgaattaattagttgcactagaattaattagttgcaactgaattaattagttgcatgcggcgcgccatgcttcatcagactct

SEQ ID NO: 7643 - DNA, 185 bp, Artificial Sequence; identical to SEQ ID NO: 7642
  Synthetic polynucleotide

SEQ ID NO: 7644 - DNA, 197 bp, Artificial Sequence
  Synthetic polynucleotide
atcatctcaccttgcctcctgtatatattgagtgcacgcctgcagggtccatggtgctgaaagagtccatggtgctgaatcggtccatggtgctgaagacgtccatggtgctgaactagtccatggtgctgaaactgtccatggtgctgaatgcgtccatggtgctgaagtaggcgcgccatgcttcatcagactct

SEQ ID NO: 7645 - DNA, 197 bp, Artificial Sequence; identical to SEQ ID NO: 7644
  Synthetic polynucleotide

SEQ ID NO: 7646 - DNA, 156 bp, Artificial Sequence
  Synthetic polynucleotide
atcatctcaccttgcctcctgcaagggcccgttagctacctgcaggttcccacgagattcccacgtcgttcccacggacttcccacgctattcccacgactttcccacgtgcttcccacggtattcccacgggcgcgccatgcttcatcagactct

SEQ ID NO: 7647 - DNA, 156 bp, Artificial Sequence; identical to SEQ ID NO: 7646
  Synthetic polynucleotide

SEQ ID NO: 7648 - DNA, 180 bp, Artificial Sequence
  Synthetic polynucleotide
atcatctcaccttgcctcctgtgcgcatagtgtcgcttcctgcaggtatcacgtgggagatatcacgtgggtcgtatcacgtggggactatcacgtgggctatatcacgtgggacttatcacgtgggtgctatcacgtggggtatatcacgtgggggcgcgccatgcttcatcagactct

SEQ ID NO: 7649 - DNA, 180 bp, Artificial Sequence; identical to SEQ ID NO: 7648
  Synthetic polynucleotide

SEQ ID NO: 7650 - DNA, 185 bp, Artificial Sequence
  Synthetic polynucleotide
atcatctcaccttgcctcctgatgatcgttacgtgggccctgcaggaacccaataaaattcgagaaacccaataaaattcgtcgaacccaataaaattcggacaacccaataaaattcgctaaacccaataaaattcgactaacccaataaaattcgtgcggcgcgccatgcttcatcagactct

SEQ ID NO: 7651 - DNA, 185 bp, Artificial Sequence; identical to SEQ ID NO: 7650
  Synthetic polynucleotide

SEQ ID NO: 7652 - DNA, 190 bp, Artificial Sequence
  Synthetic polynucleotide
atcatctcaccttgcctcctgctccaacgattgaatatcctgcagggaccccccacgaagagagaccccccacgaagtcggaccccccacgaaggacgaccccccacgaagctagaccccccacgaagactgaccccccacgaagtgcgaccccccacgaaggtaggcgcgccatgcttcatcagactct

SEQ ID NO: 7653 - DNA, 190 bp, Artificial Sequence; identical to SEQ ID NO: 7652
  Synthetic polynucleotide

SEQ ID NO: 7654 - DNA, 197 bp, Artificial Sequence
  Synthetic polynucleotide
atcatctcaccttgcctcctgggccgtatcatcaccagcctgcaggatgccaaaaatagcaagaatgccaaaaatagcatcgatgccaaaaatagcagacatgccaaaaatagcactaatgccaaaaatagcaactatgccaaaaatagcatgcatgccaaaaatagcagtaggcgcgccatgcttcatcagactct

SEQ ID NO: 7655 - DNA, 197 bp, Artificial Sequence; identical to SEQ ID NO: 7654
  Synthetic polynucleotide

SEQ ID NO: 7656 - DNA, 186 bp, Artificial Sequence
  Synthetic polynucleotide
atcatctcaccttgcctcctgcagttacttgcgactagcctgcaggcaaaactaggtcaaaggtcaagacaaaactaggtcaaaggtcatcgcaaaactaggtcaaaggtcagaccaaaactaggtcaaaggtcactacaaaactaggtcaaaggtcaactggcgcgccatgcttcatcagactct

SEQ ID NO: 7657 - DNA, 186 bp, Artificial Sequence; identical to SEQ ID NO: 7656
  Synthetic polynucleotide

SEQ ID NO: 7658 - DNA, 156 bp, Artificial Sequence
  Synthetic polynucleotide
atcatctcaccttgcctcctgtgactacatgagactatcctgcagggtaatcaaagagtaatcaatcggtaatcaagacgtaatcaactagtaatcaaactgtaatcaatgcgtaatcaagtagtaatcaaggcgcgccatgcttcatcagactct

SEQ ID NO: 7659 - DNA, 156 bp, Artificial Sequence; identical to SEQ ID NO: 7658
  Synthetic polynucleotide

SEQ ID NO: 7660 - DNA, 190 bp, Artificial Sequence
  Synthetic polynucleotide
atcatctcaccttgcctcctgtgcgcaaacgttgctgtcctgcaggattgtttacgtttgagaattgtttacgtttgtcgattgtttacgtttggacattgtttacgtttgctaattgtttacgtttgactattgtttacgtttgtgcattgtttacgtttggtaggcgcgccatgcttcatcagactct

SEQ ID NO: 7661 - DNA, 190 bp, Artificial Sequence; identical to SEQ ID NO: 7660
  Synthetic polynucleotide

SEQ ID NO: 7662 - DNA, 196 bp, Artificial Sequence
  Synthetic polynucleotide
atcatctcaccttgcctcctgcgatcaacagcgtcgtacctgcaggtgaagcgtgacgaagatgaagcgtgacgatcgtgaagcgtgacgagactgaagcgtgacgactatgaagcgtgacgaacttgaagcgtgacgatgctgaagcgtgacgagtatgaagcgtgacgaggcgcgccatgcttcatcagactct

SEQ ID NO: 7663 - DNA, 196 bp, Artificial Sequence; identical to SEQ ID NO: 7662
  Synthetic polynucleotide

SEQ ID NO: 7664 - DNA, 164 bp, Artificial Sequence
  Synthetic polynucleotide
atcatctcaccttgcctcctgcagtctaccgccgtgtacctgcaggaaagtccagagaaaagtccagtcgaaagtccaggacaaagtccagctaaaagtccagactaaagtccagtgcaaagtccaggtaaaagtccagggcgcgccatgcttcatcagactct

SEQ ID NO: 7665 - DNA, 164 bp, Artificial Sequence; identical to SEQ ID NO: 7664
  Synthetic polynucleotide

SEQ ID NO: 7666 - DNA, 188 bp, Artificial Sequence
  Synthetic polynucleotide
atcatctcaccttgcctcctgaggtccttatggtattccctgcaggaatgcgggtgtgagaaatgcgggtgtgtcgaatgcgggtgtggacaatgcgggtgtgctaaatgcgggtgtgactaatgcgggtgtgtgcaatgcgggtgtggtaaatgcgggtgtgggcgcgccatgcttcatcagactct

SEQ ID NO: 7667 - DNA, 188 bp, Artificial Sequence; identical to SEQ ID NO: 7666
  Synthetic polynucleotide

SEQ ID NO: 7668 - DNA, 180 bp, Artificial Sequence
  Synthetic polynucleotide
atcatctcaccttgcctcctgatagagttatcgtttgccctgcaggccaataaaaccagaccaataaaacctcgccaataaaaccgacccaataaaaccctaccaataaaaccactccaataaaacctgcccaataaaaccgtaccaataaaaccggcgcgccatgcttcatcagactct

SEQ ID NO: 7669 - DNA, 180 bp, Artificial Sequence; identical to SEQ ID NO: 7668
  Synthetic polynucleotide

SEQ ID NO: 7670 - DNA, 172 bp, Artificial Sequence
  Synthetic polynucleotide
atcatctcaccttgcctcctgaaattgttccaggaccccctgcagggctacgtcacagagctacgtcactcggctacgtcacgacgctacgtcacctagctacgtcacactgctacgtcactgcgctacgtcacgtagctacgtcacggcgcgccatgcttcatcagactct

SEQ ID NO: 7671 - DNA, 172 bp, Artificial Sequence; identical to SEQ ID NO: 7670
  Synthetic polynucleotide

SEQ ID NO: 7672 - DNA, 200 bp, Artificial Sequence
  Synthetic polynucleotide
atcatctcaccttgcctcctgggaccttaatacaaccccctgcaggatggccatataaggagatgagaatggccatataaggagatgtcgatggccatataaggagatggacatggccatataaggagatgctaatggccatataaggagatgactatggccatataaggagatgggcgcgccatgcttcatcagactct

SEQ ID NO: 7673 - DNA, 200 bp, Artificial Sequence; identical to SEQ ID NO: 7672
  Synthetic polynucleotide

SEQ ID NO: 7674 - DNA, 197 bp, Artificial Sequence
  Synthetic polynucleotide
atcatctcaccttgcctcctgtgcacagcagtttcgtccctgcaggtctgcctagcaacagagatctgcctagcaacagtcgtctgcctagcaacaggactctgcctagcaacagctatctgcctagcaacagacttctgcctagcaacagtgctctgcctagcaacaggtaggcgcgccatgcttcatcagactct

SEQ ID NO: 7675 - DNA, 197 bp, Artificial Sequence; identical to SEQ ID NO: 7674
  Synthetic polynucleotide

SEQ ID NO: 7676 - DNA, 156 bp, Artificial Sequence
  Synthetic polynucleotide
atcatctcaccttgcctcctgcgtccacaacatacaggcctgcaggcagctgtcagacagctgtctcgcagctgtcgaccagctgtcctacagctgtcactcagctgtctgccagctgtcgtacagctgtcggcgcgccatgcttcatcagactct

SEQ ID NO: 7677 - DNA, 156 bp, Artificial Sequence; identical to SEQ ID NO: 7676
  Synthetic polynucleotide

SEQ ID NO: 7678 - DNA, 172 bp, Artificial Sequence
  Synthetic polynucleotide
atcatctcaccttgcctcctgagccggaggtctgcaaacctgcaggaagcacttaaagaaagcacttaatcgaagcacttaagacaagcacttaactaaagcacttaaactaagcacttaatgcaagcacttaagtaaagcacttaaggcgcgccatgcttcatcagactct

SEQ ID NO: 7679 - DNA, 172 bp, Artificial Sequence; identical to SEQ ID NO: 7678
  Synthetic polynucleotide

SEQ ID NO: 7680 - DNA, 148 bp, Artificial Sequence
  Synthetic polynucleotide
atcatctcaccttgcctcctggagattctcaattctgtcctgcaggaatatatagaaatatattcgaatatatgacaatatatctaaatatatactaatatattgcaatatatgtaaatatatggcgcgccatgcttcatcagactct

SEQ ID NO: 7681 - DNA, 148 bp, Artificial Sequence; identical to SEQ ID NO: 7680
  Synthetic polynucleotide

SEQ ID NO: 7682 - DNA, 188 bp, Artificial Sequence
  Synthetic polynucleotide
atcatctcaccttgcctcctgacagcgttcttgacagccctgcaggcaccacctgttgagacaccacctgttgtcgcaccacctgttggaccaccacctgttgctacaccacctgttgactcaccacctgttgtgccaccacctgttggtacaccacctgttgggcgcgccatgcttcatcagactct

SEQ ID NO: 7683 - DNA, 188 bp, Artificial Sequence; identical to SEQ ID NO: 7682
  Synthetic polynucleotide

SEQ ID NO: 7684 - DNA, 172 bp, Artificial Sequence
  Synthetic polynucleotide
atcatctcaccttgcctcctggtccacatcaatcctatcctgcagggcccccgggcagagcccccgggctcggcccccgggcgacgcccccgggcctagcccccgggcactgcccccgggctgcgcccccgggcgtagcccccgggcggcgcgccatgcttcatcagactct

SEQ ID NO: 7685 - DNA, 172 bp, Artificial Sequence; identical to SEQ ID NO: 7684
  Synthetic polynucleotide

SEQ ID NO: 7686 - DNA, 197 bp, Artificial Sequence
  Synthetic polynucleotide
atcatctcaccttgcctcctgaaatggcttcgcgtcaccctgcaggctcttgttgtttgttagactcttgttgtttgtttcgctcttgttgtttgttgacctcttgttgtttgttctactcttgttgtttgttactctcttgttgtttgtttgcctcttgttgtttgttgtaggcgcgccatgcttcatcagactct

SEQ ID NO: 7687 - DNA, 197 bp, Artificial Sequence; identical to SEQ ID NO: 7686
  Synthetic polynucleotide

SEQ ID NO: 7688 - DNA, 172 bp, Artificial Sequence
  Synthetic polynucleotide
atcatctcaccttgcctcctgccatcgcaaggctacgtcctgcagggttgctatggagagttgctatggtcggttgctatgggacgttgctatggctagttgctatggactgttgctatggtgcgttgctatgggtagttgctatggggcgcgccatgcttcatcagactct

SEQ ID NO: 7689 - DNA, 172 bp, Artificial Sequence; identical to SEQ ID NO: 7688
  Synthetic polynucleotide

SEQ ID NO: 7690 - DNA, 191 bp, Artificial Sequence
  Synthetic polynucleotide
atcatctcaccttgcctcctgagcatcttccggcacctcctgcagggatgaacttcctgaaccgtttagagatgaacttcctgaaccgttttcggatgaacttcctgaaccgtttgacgatgaacttcctgaaccgtttctagatgaacttcctgaaccgtttactggcgcgccatgcttcatcagactct

SEQ ID NO: 7691 - DNA, 191 bp, Artificial Sequence; identical to SEQ ID NO: 7690
  Synthetic polynucleotide

SEQ ID NO: 7692 - DNA, 190 bp, Artificial Sequence
  Synthetic polynucleotide
atcatctcaccttgcctcctgattccacgcctcagatacctgcaggaacggttaacggttagaaacggttaacggtttcgaacggttaacggttgacaacggttaacggttctaaacggttaacggttactaacggttaacggtttgcaacggttaacggttgtaggcgcgccatgcttcatcagactct

SEQ ID NO: 7693 - DNA, 190 bp, Artificial Sequence; identical to SEQ ID NO: 7692
  Synthetic polynucleotide

SEQ ID NO: 7694 - DNA, 172 bp, Artificial Sequence
  Synthetic polynucleotide
atcatctcaccttgcctcctgtccgatttgtacacatccctgcaggcttttatagaagacttttatagatcgcttttatagagaccttttatagactacttttatagaactcttttatagatgccttttatagagtacttttatagaggcgcgccatgcttcatcagactct

SEQ ID NO: 7695 - DNA, 172 bp, Artificial Sequence; identical to SEQ ID NO: 7694
  Synthetic polynucleotide

SEQ ID NO: 7696 - DNA, 164 bp, Artificial Sequence
  Synthetic polynucleotide
atcatctcaccttgcctcctgttacaaatctcggtgtacctgcagggggcaacccagagggcaaccctcggggcaacccgacgggcaacccctagggcaacccactgggcaaccctgcgggcaacccgtagggcaacccggcgcgccatgcttcatcagactct

SEQ ID NO: 7697 - DNA, 164 bp, Artificial Sequence; identical to SEQ ID NO: 7696
  Synthetic polynucleotide

SEQ ID NO: 7698 - DNA, 191 bp, Artificial Sequence
  Synthetic polynucleotide
atcatctcaccttgcctcctgacagaagagttccttggcctgcagggtgcgctaattagtgcaagagtgcgctaattagtgcatcggtgcgctaattagtgcagacgtgcgctaattagtgcactagtgcgctaattagtgcaactgtgcgctaattagtgcatgcggcgcgccatgcttcatcagactct

SEQ ID NO: 7699 - DNA, 191 bp, Artificial Sequence; identical to SEQ ID NO: 7698
  Synthetic polynucleotide

SEQ ID NO: 7700 - DNA, 196 bp, Artificial Sequence
  Synthetic polynucleotide
atcatctcaccttgcctcctgacaagtttgccagctaacctgcaggcacttttaattagagacacttttaattagtcgcacttttaattaggaccacttttaattagctacacttttaattagactcacttttaattagtgccacttttaattaggtacacttttaattagggcgcgccatgcttcatcagactct

SEQ ID NO: 7701 - DNA, 196 bp, Artificial Sequence; identical to SEQ ID NO: 7700
  Synthetic polynucleotide

SEQ ID NO: 7702 - DNA, 180 bp, Artificial Sequence
  Synthetic polynucleotide
atcatctcaccttgcctcctgtcagttggctggtgaagcctgcaggagtcgtaaaaaagaagtcgtaaaaatcgagtcgtaaaaagacagtcgtaaaaactaagtcgtaaaaaactagtcgtaaaaatgcagtcgtaaaaagtaagtcgtaaaaaggcgcgccatgcttcatcagactct

SEQ ID NO: 7703 - DNA, 180 bp, Artificial Sequence; identical to SEQ ID NO: 7702
  Synthetic polynucleotide

SEQ ID NO: 7704 - DNA, 188 bp, Artificial Sequence
  Synthetic polynucleotide
atcatctcaccttgcctcctgaaccacagctaaggctccctgcagggatttaacataaagagatttaacataatcggatttaacataagacgatttaacataactagatttaacataaactgatttaacataatgcgatttaacataagtagatttaacataaggcgcgccatgcttcatcagactct

SEQ ID NO: 7705 - DNA, 188 bp, Artificial Sequence; identical to SEQ ID NO: 7704
  Synthetic polynucleotide

SEQ ID NO: 7706 - DNA, 172 bp, Artificial Sequence
  Synthetic polynucleotide
atcatctcaccttgcctcctgtttagtggatgactggacctgcaggttatcccctaagattatcccctatcgttatcccctagacttatcccctactattatcccctaactttatcccctatgcttatcccctagtattatcccctaggcgcgccatgcttcatcagactct

SEQ ID NO: 7707 - DNA, 172 bp, Artificial Sequence; identical to SEQ ID NO: 7706
  Synthetic polynucleotide

SEQ ID NO: 7708 - DNA, 172 bp, Artificial Sequence
  Synthetic polynucleotide
atcatctcaccttgcctcctgggtgaggctgaatcccacctgcaggaccacttgaaagaaccacttgaatcgaccacttgaagacaccacttgaactaaccacttgaaactaccacttgaatgcaccacttgaagtaaccacttgaaggcgcgccatgcttcatcagactct

SEQ ID NO: 7709 - DNA, 172 bp, Artificial Sequence; identical to SEQ ID NO: 7708
  Synthetic polynucleotide

SEQ ID NO: 7710 - DNA, 191 bp, Artificial Sequence
  Synthetic polynucleotide
atcatctcaccttgcctcctgtatgtgcttattggtggcctgcaggaaccggttaaaccggttagaaaccggttaaaccggtttcgaaccggttaaaccggttgacaaccggttaaaccggttctaaaccggttaaaccggttactaaccggttaaaccggtttgcggcgcgccatgcttcatcagactct

SEQ ID NO: 7711 - DNA, 191 bp, Artificial Sequence; identical to SEQ ID NO: 7710
  Synthetic polynucleotide

SEQ ID NO: 7712 - DNA, 197 bp, Artificial Sequence
  Synthetic polynucleotide
atcatctcaccttgcctcctgacccgcacatgttgaagcctgcaggatcgatcaggttatcgatagaatcgatcaggttatcgattcgatcgatcaggttatcgatgacatcgatcaggttatcgatctaatcgatcaggttatcgatactatcgatcaggttatcgattgcggcgcgccatgcttcatcagactct

SEQ ID NO: 7713 - DNA, 197 bp, Artificial Sequence; identical to SEQ ID NO: 7712
  Synthetic polynucleotide

SEQ ID NO: 7714 - DNA, 164 bp, Artificial Sequence
  Synthetic polynucleotide
atcatctcaccttgcctcctgcgtcgacgcactctaatcctgcaggctaattatcagactaattatctcgctaattatcgacctaattatcctactaattatcactctaattatctgcctaattatcgtactaattatcggcgcgccatgcttcatcagactct

SEQ ID NO: 7715 - DNA, 164 bp, Artificial Sequence; identical to SEQ ID NO: 7714
  Synthetic polynucleotide

SEQ ID NO: 7716 - DNA, 197 bp, Artificial Sequence
  Synthetic polynucleotide
atcatctcaccttgcctcctggttccttactacggtgacctgcaggccgaaaccgaaactaagaccgaaaccgaaactatcgccgaaaccgaaactagacccgaaaccgaaactactaccgaaaccgaaactaactccgaaaccgaaactatgcccgaaaccgaaactagtaggcgcgccatgcttcatcagactct

SEQ ID NO: 7717 - DNA, 197 bp, Artificial Sequence; identical to SEQ ID NO: 7716
  Synthetic polynucleotide

SEQ ID NO: 7718 - DNA, 172 bp, Artificial Sequence
  Synthetic polynucleotide
atcatctcaccttgcctcctgggagcaacgctggttaacctgcagggttacgtaatagagttacgtaattcggttacgtaatgacgttacgtaatctagttacgtaatactgttacgtaattgcgttacgtaatgtagttacgtaatggcgcgccatgcttcatcagactct

SEQ ID NO: 7719 - DNA, 172 bp, Artificial Sequence; identical to SEQ ID NO: 7718
  Synthetic polynucleotide

SEQ ID NO: 7720 - DNA, 188 bp, Artificial Sequence
  Synthetic polynucleotide
atcatctcaccttgcctcctgcttgccctattcagggacctgcaggtcggtggtcgccagatcggtggtcgcctcgtcggtggtcgccgactcggtggtcgccctatcggtggtcgccacttcggtggtcgcctgctcggtggtcgccgtatcggtggtcgccggcgcgccatgcttcatcagactct

SEQ ID NO: 7721 - DNA, 188 bp, Artificial Sequence; identical to SEQ ID NO: 7720
  Synthetic polynucleotide

SEQ ID NO: 7722 - DNA, 180 bp, Artificial Sequence
  Synthetic polynucleotide
atcatctcaccttgcctcctgggccggaatctctgagtcctgcaggctcattggctgagactcattggctgtcgctcattggctggacctcattggctgctactcattggctgactctcattggctgtgcctcattggctggtactcattggctgggcgcgccatgcttcatcagactct

SEQ ID NO: 7723 - DNA, 180 bp, Artificial Sequence; identical to SEQ ID NO: 7722
  Synthetic polynucleotide

SEQ ID NO: 7724 - DNA, 156 bp, Artificial Sequence
  Synthetic polynucleotide
atcatctcaccttgcctcctgcgtctagcttacgaccacctgcaggtgacctagagatgacctagtcgtgacctaggactgacctagctatgacctagacttgacctagtgctgacctaggtatgacctagggcgcgccatgcttcatcagactct

SEQ ID NO: 7725 - DNA, 156 bp, Artificial Sequence; identical to SEQ ID NO: 7724
  Synthetic polynucleotide

SEQ ID NO: 7726 - DNA, 197 bp, Artificial Sequence
  Synthetic polynucleotide
atcatctcaccttgcctcctgtcaatagtgaagcgttgcctgcaggtccatgtttactttgagatccatgtttactttgtcgtccatgtttactttggactccatgtttactttgctatccatgtttactttgacttccatgtttactttgtgctccatgtttactttggtaggcgcgccatgcttcatcagactct

SEQ ID NO: 7727 - DNA, 197 bp, Artificial Sequence; identical to SEQ ID NO: 7726
  Synthetic polynucleotide

SEQ ID NO: 7728 - DNA, 197 bp, Artificial Sequence
  Synthetic polynucleotide
atcatctcaccttgcctcctgtggagccgaacggtcatcctgcaggaacaatgaaattgttagaaacaatgaaattgtttcgaacaatgaaattgttgacaacaatgaaattgttctaaacaatgaaattgttactaacaatgaaattgtttgcaacaatgaaattgttgtaggcgcgccatgcttcatcagactct

SEQ ID NO: 7729 - DNA, 197 bp, Artificial Sequence; identical to SEQ ID NO: 7728
  Synthetic polynucleotide

SEQ ID NO: 7730 - DNA, 196 bp, Artificial Sequence
  Synthetic polynucleotide
atcatctcaccttgcctcctgagttgagcccgatctgccctgcaggaaacccgcatattagaaaacccgcatatttcgaaacccgcatattgacaaacccgcatattctaaaacccgcatattactaaacccgcatatttgcaaacccgcatattgtaaaacccgcatattggcgcgccatgcttcatcagactct

SEQ ID NO: 7731 - DNA, 196 bp, Artificial Sequence; identical to SEQ ID NO: 7730
  Synthetic polynucleotide

SEQ ID NO: 7732 - DNA, 156 bp, Artificial Sequence
  Synthetic polynucleotide
atcatctcaccttgcctcctgccttaagcacggcttgacctgcaggaagtgataagaaagtgatatcgaagtgatagacaagtgatactaaagtgataactaagtgatatgcaagtgatagtaaagtgataggcgcgccatgcttcatcagactct

SEQ ID NO: 7733 - DNA, 156 bp, Artificial Sequence; identical to SEQ ID NO: 7732
  Synthetic polynucleotide

SEQ ID NO: 7734 - DNA, 164 bp, Artificial Sequence
  Synthetic polynucleotide
atcatctcaccttgcctcctggttgacggtagtcagcacctgcaggcgtgacgtcagacgtgacgtctcgcgtgacgtcgaccgtgacgtcctacgtgacgtcactcgtgacgtctgccgtgacgtcgtacgtgacgtcggcgcgccatgcttcatcagactct

SEQ ID NO: 7735 - DNA, 164 bp, Artificial Sequence; identical to SEQ ID NO: 7734
  Synthetic polynucleotide

SEQ ID NO: 7736 - DNA, 197 bp, Artificial Sequence
  Synthetic polynucleotide
atcatctcaccttgcctcctgcttgactcaggacctgccctgcaggggggccgctctaggcagaggggccgctctaggctcgggggccgctctaggcgacggggccgctctaggcctaggggccgctctaggcactggggccgctctaggctgcggggccgctctaggcgtaggcgcgccatgcttcatcagactct

SEQ ID NO: 7737 - DNA, 197 bp, Artificial Sequence; identical to SEQ ID NO: 7736
  Synthetic polynucleotide

SEQ ID NO: 7738 - DNA, 196 bp, Artificial Sequence
  Synthetic polynucleotide
atcatctcaccttgcctcctgacctgtcaaatcattaccctgcaggaggccaaagtccaagaaggccaaagtccatcgaggccaaagtccagacaggccaaagtccactaaggccaaagtccaactaggccaaagtccatgcaggccaaagtccagtaaggccaaagtccaggcgcgccatgcttcatcagactct

SEQ ID NO: 7739 - DNA, 196 bp, Artificial Sequence; identical to SEQ ID NO: 7738
  Synthetic polynucleotide

SEQ ID NO: 7740 - DNA, 185 bp, Artificial Sequence
  Synthetic polynucleotide
atcatctcaccttgcctcctgcattcccattcaaagatcctgcagggattgaggtcacgccaagagattgaggtcacgccatcggattgaggtcacgccagacgattgaggtcacgccactagattgaggtcacgccaactgattgaggtcacgccatgcggcgcgccatgcttcatcagactct

SEQ ID NO: 7741 - DNA, 185 bp, Artificial Sequence; identical to SEQ ID NO: 7740
  Synthetic polynucleotide

SEQ ID NO: 7742 - DNA, 180 bp, Artificial Sequence
  Synthetic polynucleotide
atcatctcaccttgcctcctgttgataatccctcgtggcctgcaggaacacctgtcaagaaacacctgtcatcgaacacctgtcagacaacacctgtcactaaacacctgtcaactaacacctgtcatgcaacacctgtcagtaaacacctgtcaggcgcgccatgcttcatcagactct

SEQ ID NO: 7743 - DNA, 180 bp, Artificial Sequence; identical to SEQ ID NO: 7742
  Synthetic polynucleotide

SEQ ID NO: 7744 - DNA, 188 bp, Artificial Sequence
  Synthetic polynucleotide
atcatctcaccttgcctcctgctggtgtagcagttatgcctgcaggtaaatcactgcaagataaatcactgcatcgtaaatcactgcagactaaatcactgcactataaatcactgcaacttaaatcactgcatgctaaatcactgcagtataaatcactgcaggcgcgccatgcttcatcagactct

SEQ ID NO: 7745 - DNA, 188 bp, Artificial Sequence; identical to SEQ ID NO: 7744
  Synthetic polynucleotide

SEQ ID NO: 7746 - DNA, 188 bp, Artificial Sequence
  Synthetic polynucleotide
atcatctcaccttgcctcctgttgtcatggttctgactcctgcaggaaattgtgcaatagaaaattgtgcaattcgaaattgtgcaatgacaaattgtgcaatctaaaattgtgcaatactaaattgtgcaattgcaaattgtgcaatgtaaaattgtgcaatggcgcgccatgcttcatcagactct

SEQ ID NO: 7747 - DNA, 188 bp, Artificial Sequence; identical to SEQ ID NO: 7746
  Synthetic polynucleotide

SEQ ID NO: 7748 - DNA, 156 bp, Artificial Sequence
  Synthetic polynucleotide
atcatctcaccttgcctcctgctgagaaggtagtatgccctgcagggggaagccagagggaagcctcggggaagccgacgggaagccctagggaagccactgggaagcctgcgggaagccgtagggaagccggcgcgccatgcttcatcagactct

SEQ ID NO: 7749 - DNA, 156 bp, Artificial Sequence; identical to SEQ ID NO: 7748
  Synthetic polynucleotide

SEQ ID NO: 7750 - DNA, 180 bp, Artificial Sequence
  Synthetic polynucleotide
atcatctcaccttgcctcctgcgtagaggtctaattctcctgcagggcataatttatagagcataatttattcggcataatttatgacgcataatttatctagcataatttatactgcataatttattgcgcataatttatgtagcataatttatggcgcgccatgcttcatcagactct

SEQ ID NO: 7751 - DNA, 180 bp, Artificial Sequence; identical to SEQ ID NO: 7750
  Synthetic polynucleotide

SEQ ID NO: 7752 - DNA, 164 bp, Artificial Sequence
  Synthetic polynucleotide
atcatctcaccttgcctcctgaccgattgtagtcccaccctgcaggggccgggttagaggccgggtttcgggccgggttgacggccgggttctaggccgggttactggccgggtttgcggccgggttgtaggccgggttggcgcgccatgcttcatcagactct

SEQ ID NO: 7753 - DNA, 164 bp, Artificial Sequence; identical to SEQ ID NO: 7752
  Synthetic polynucleotide

SEQ ID NO: 7754 - DNA, 200 bp, Artificial Sequence
  Synthetic polynucleotide
atcatctcaccttgcctcctgctacggttctctgagatcctgcagggccgaggcctggggcccccagagccgaggcctggggccccctcggccgaggcctggggcccccgacgccgaggcctggggcccccctagccgaggcctggggcccccactgccgaggcctggggcccccggcgcgccatgcttcatcagactct

SEQ ID NO: 7755 - DNA, 200 bp, Artificial Sequence; identical to SEQ ID NO: 7754
  Synthetic polynucleotide

SEQ ID NO: 7756 - DNA, 190 bp, Artificial Sequence
  Synthetic polynucleotide
atcatctcaccttgcctcctgattgtacgatgcaggctcctgcaggggggccgaggcctgagaggggccgaggcctgtcgggggccgaggcctggacggggccgaggcctgctaggggccgaggcctgactggggccgaggcctgtgcggggccgaggcctggtaggcgcgccatgcttcatcagactct

SEQ ID NO: 7757 - DNA, 190 bp, Artificial Sequence; identical to SEQ ID NO: 7756
  Synthetic polynucleotide

SEQ ID NO: 7758 - DNA, 164 bp, Artificial Sequence
  Synthetic polynucleotide
atcatctcaccttgcctcctgcagttccgtccatcttgcctgcaggccacctgccagaccacctgcctcgccacctgccgacccacctgccctaccacctgccactccacctgcctgcccacctgccgtaccacctgccggcgcgccatgcttcatcagactct

SEQ ID NO: 7759 - DNA, 164 bp, Artificial Sequence; identical to SEQ ID NO: 7758
  Synthetic polynucleotide

SEQ ID NO: 7760 - DNA, 172 bp, Artificial Sequence
  Synthetic polynucleotide
atcatctcaccttgcctcctgcatatatctgtgccgatcctgcaggtttgcggtttagatttgcggttttcgtttgcggtttgactttgcggtttctatttgcggtttacttttgcggttttgctttgcggtttgtatttgcggtttggcgcgccatgcttcatcagactct

SEQ ID NO: 7761 - DNA, 172 bp, Artificial Sequence; identical to SEQ ID NO: 7760
  Synthetic polynucleotide

SEQ ID NO: 7762 - DNA, 188 bp, Artificial Sequence
  Synthetic polynucleotide
atcatctcaccttgcctcctgtagaaccttaccacctccctgcaggaaaattgctgacagaaaaattgctgactcgaaaattgctgacgacaaaattgctgacctaaaaattgctgacactaaaattgctgactgcaaaattgctgacgtaaaaattgctgacggcgcgccatgcttcatcagactct

SEQ ID NO: 7763 - DNA, 188 bp, Artificial Sequence; identical to SEQ ID NO: 7762
  Synthetic polynucleotide

SEQ ID NO: 7764 - DNA, 180 bp, Artificial Sequence
  Synthetic polynucleotide
atcatctcaccttgcctcctgctgcagccatttgagctcctgcaggagggtaacagcagaagggtaacagctcgagggtaacagcgacagggtaacagcctaagggtaacagcactagggtaacagctgcagggtaacagcgtaagggtaacagcggcgcgccatgcttcatcagactct

SEQ ID NO: 7765 - DNA, 180 bp, Artificial Sequence; identical to SEQ ID NO: 7764
  Synthetic polynucleotide

SEQ ID NO: 7766 - DNA, 197 bp, Artificial Sequence
  Synthetic polynucleotide
atcatctcaccttgcctcctgactagcagcgatgaatacctgcagggctaaccacagacttagagctaaccacagactttcggctaaccacagacttgacgctaaccacagacttctagctaaccacagacttactgctaaccacagactttgcgctaaccacagacttgtaggcgcgccatgcttcatcagactct

SEQ ID NO: 7767 - DNA, 197 bp, Artificial Sequence; identical to SEQ ID NO: 7766
  Synthetic polynucleotide

SEQ ID NO: 7768 - DNA, 197 bp, Artificial Sequence
  Synthetic polynucleotide
atcatctcaccttgcctcctgactaatagtctagctcgcctgcaggatgccaaaaatagaaagaatgccaaaaatagaatcgatgccaaaaatagaagacatgccaaaaatagaactaatgccaaaaatagaaactatgccaaaaatagaatgcatgccaaaaatagaagtaggcgcgccatgcttcatcagactct

SEQ ID NO: 7769 - DNA, 197 bp, Artificial Sequence; identical to SEQ ID NO: 7768
  Synthetic polynucleotide

SEQ ID NO: 7770 - DNA, 132 bp, Artificial Sequence
  Synthetic polynucleotide
atcatctcaccttgcctcctgggaggtgattgtcagcccctgcaggaccaaagaaccaatcgaccaagacaccaactaaccaaactaccaatgcaccaagtaaccaaggcgcgccatgcttcatcagactct

SEQ ID NO: 7771 - DNA, 132 bp, Artificial Sequence; identical to SEQ ID NO: 7770
  Synthetic polynucleotide

SEQ ID NO: 7772 - DNA, 172 bp, Artificial Sequence
  Synthetic polynucleotide
atcatctcaccttgcctcctgcttaccgccttagatgccctgcaggtgtttacttaagatgtttacttatcgtgtttacttagactgtttacttactatgtttacttaacttgtttacttatgctgtttacttagtatgtttacttaggcgcgccatgcttcatcagactct

SEQ ID NO: 7773 - DNA, 172 bp, Artificial Sequence; identical to SEQ ID NO: 7772
  Synthetic polynucleotide

SEQ ID NO: 7774 - DNA, 180 bp, Artificial Sequence
  Synthetic polynucleotide
atcatctcaccttgcctcctgaaccattaatatccggccctgcaggataatggcggcagaataatggcggctcgataatggcggcgacataatggcggcctaataatggcggcactataatggcggctgcataatggcggcgtaataatggcggcggcgcgccatgcttcatcagactct

SEQ ID NO: 7775 - DNA, 180 bp, Artificial Sequence; identical to SEQ ID NO: 7774
  Synthetic polynucleotide

SEQ ID NO: 7776 - DNA, 185 bp, Artificial Sequence
  Synthetic polynucleotide
atcatctcaccttgcctcctgtgaacgagcatggcatgcctgcaggcttaattataattaaaagacttaattataattaaatcgcttaattataattaaagaccttaattataattaaactacttaattataattaaaactcttaattataattaaatgcggcgcgccatgcttcatcagactct

SEQ ID NO: 7777 - DNA, 185 bp, Artificial Sequence; identical to SEQ ID NO: 7776
  Synthetic polynucleotide

SEQ ID NO: 7778 - DNA, 196 bp, Artificial Sequence
  Synthetic polynucleotide
atcatctcaccttgcctcctgcgatgctgactagaggacctgcagggaggggcgcagctgcgccccaaagagaggggcgcagctgcgccccaatcggaggggcgcagctgcgccccaagacgaggggcgcagctgcgccccaactagaggggcgcagctgcgccccaaactggcgcgccatgcttcatcagactct

SEQ ID NO: 7779 - DNA, 196 bp, Artificial Sequence; identical to SEQ ID NO: 7778
  Synthetic polynucleotide

SEQ ID NO: 7780 - DNA, 191 bp, Artificial Sequence
  Synthetic polynucleotide
atcatctcaccttgcctcctggtatacaactaccattgcctgcaggtccggcgccccctggtggccgagatccggcgccccctggtggccgtcgtccggcgccccctggtggccggactccggcgccccctggtggccgctatccggcgccccctggtggccgactggcgcgccatgcttcatcagactct

SEQ ID NO: 7781 - DNA, 191 bp, Artificial Sequence; identical to SEQ ID NO: 7780
  Synthetic polynucleotide

SEQ ID NO: 7782 - DNA, 156 bp, Artificial Sequence
  Synthetic polynucleotide
atcatctcaccttgcctcctgcccttattaatccttgccctgcaggtatcgattagatatcgatttcgtatcgattgactatcgattctatatcgattacttatcgatttgctatcgattgtatatcgattggcgcgccatgcttcatcagactct

SEQ ID NO: 7783 - DNA, 156 bp, Artificial Sequence; identical to SEQ ID NO: 7782
  Synthetic polynucleotide

SEQ ID NO: 7784 - DNA, 197 bp, Artificial Sequence
  Synthetic polynucleotide
atcatctcaccttgcctcctgaactaccgagactctgtcctgcaggaggtcacggtgacctagaaggtcacggtgaccttcgaggtcacggtgacctgacaggtcacggtgacctctaaggtcacggtgacctactaggtcacggtgaccttgcaggtcacggtgacctgtaggcgcgccatgcttcatcagactct

SEQ ID NO: 7785 - DNA, 197 bp, Artificial Sequence; identical to SEQ ID NO: 7784
  Synthetic polynucleotide

SEQ ID NO: 7786 - DNA, 172 bp, Artificial Sequence
  Synthetic polynucleotide
atcatctcaccttgcctcctgcctcgacgagtttagtgcctgcaggtataattattagatataattatttcgtataattattgactataattattctatataattattacttataattatttgctataattattgtatataattattggcgcgccatgcttcatcagactct

SEQ ID NO: 7787 - DNA, 172 bp, Artificial Sequence; identical to SEQ ID NO: 7786
  Synthetic polynucleotide

SEQ ID NO: 7788 - DNA, 185 bp, Artificial Sequence
  Synthetic polynucleotide
atcatctcaccttgcctcctgcagatggataagcaaggcctgcaggtcaggcgcgcgcgccaagatcaggcgcgcgcgccatcgtcaggcgcgcgcgccagactcaggcgcgcgcgccactatcaggcgcgcgcgccaacttcaggcgcgcgcgccatgcggcgcgccatgcttcatcagactct

SEQ ID NO: 7789 - DNA, 185 bp, Artificial Sequence; identical to SEQ ID NO: 7788
  Synthetic polynucleotide

SEQ ID NO: 7790 - DNA, 156 bp, Artificial Sequence
  Synthetic polynucleotide
atcatctcaccttgcctcctgggaaggatagtatctagcctgcaggcttaattaagacttaattatcgcttaattagaccttaattactacttaattaactcttaattatgccttaattagtacttaattaggcgcgccatgcttcatcagactct

SEQ ID NO: 7791 - DNA, 156 bp, Artificial Sequence; identical to SEQ ID NO: 7790
  Synthetic polynucleotide

SEQ ID NO: 7792 - DNA, 196 bp, Artificial Sequence
  Synthetic polynucleotide
atcatctcaccttgcctcctgttgtcgcttgtagatctcctgcagggttgtttgtttttagagttgtttgttttttcggttgtttgtttttgacgttgtttgtttttctagttgtttgtttttactgttgtttgttttttgcgttgtttgtttttgtagttgtttgtttttggcgcgccatgcttcatcagactct

SEQ ID NO: 7793 - DNA, 196 bp, Artificial Sequence; identical to SEQ ID NO: 7792
  Synthetic polynucleotide

SEQ ID NO: 7794 - DNA, 164 bp, Artificial Sequence
  Synthetic polynucleotide
atcatctcaccttgcctcctgagccgtacgatacgctgcctgcaggtttaagtgcagatttaagtgctcgtttaagtgcgactttaagtgcctatttaagtgcacttttaagtgctgctttaagtgcgtatttaagtgcggcgcgccatgcttcatcagactct

SEQ ID NO: 7795 - DNA, 164 bp, Artificial Sequence; identical to SEQ ID NO: 7794
  Synthetic polynucleotide

SEQ ID NO: 7796 - DNA, 196 bp, Artificial Sequence
  Synthetic polynucleotide
atcatctcaccttgcctcctgtccgacgagacggtcatcctgcaggttgtttttgtttaagattgtttttgtttatcgttgtttttgtttagacttgtttttgtttactattgtttttgtttaactttgtttttgtttatgcttgtttttgtttagtattgtttttgtttaggcgcgccatgcttcatcagactct

SEQ ID NO: 7797 - DNA, 196 bp, Artificial Sequence; identical to SEQ ID NO: 7796
  Synthetic polynucleotide

SEQ ID NO: 7798 - DNA, 196 bp, Artificial Sequence
  Synthetic polynucleotide
atcatctcaccttgcctcctgccgtgaagttcatcattcctgcaggcatctcgtctagtagacatctcgtctagttcgcatctcgtctagtgaccatctcgtctagtctacatctcgtctagtactcatctcgtctagttgccatctcgtctagtgtacatctcgtctagtggcgcgccatgcttcatcagactct

SEQ ID NO: 7799 - DNA, 196 bp, Artificial Sequence; identical to SEQ ID NO: 7798
  Synthetic polynucleotide

SEQ ID NO: 7800 - DNA, 185 bp, Artificial Sequence
  Synthetic polynucleotide
atcatctcaccttgcctcctgtagatggacatggctcacctgcaggctcattaattatgcatagactcattaattatgcattcgctcattaattatgcatgacctcattaattatgcatctactcattaattatgcatactctcattaattatgcattgcggcgcgccatgcttcatcagactct

SEQ ID NO: 7801 - DNA, 185 bp, Artificial Sequence; identical to SEQ ID NO: 7800
  Synthetic polynucleotide

SEQ ID NO: 7802 - DNA, 180 bp, Artificial Sequence
  Synthetic polynucleotide
atcatctcaccttgcctcctggtttgtatccttacgcacctgcaggctgtccatggtagactgtccatggttcgctgtccatggtgacctgtccatggtctactgtccatggtactctgtccatggttgcctgtccatggtgtactgtccatggtggcgcgccatgcttcatcagactct

SEQ ID NO: 7803 - DNA, 180 bp, Artificial Sequence; identical to SEQ ID NO: 7802
  Synthetic polynucleotide

SEQ ID NO: 7804 - DNA, 197 bp, Artificial Sequence
  Synthetic polynucleotide
atcatctcaccttgcctcctgtcaagatggcggaatatcctgcagggatatttctgctctaagagatatttctgctctatcggatatttctgctctagacgatatttctgctctactagatatttctgctctaactgatatttctgctctatgcgatatttctgctctagtaggcgcgccatgcttcatcagactct

SEQ ID NO: 7805 - DNA, 197 bp, Artificial Sequence; identical to SEQ ID NO: 7804
  Synthetic polynucleotide

SEQ ID NO: 7806 - DNA, 188 bp, Artificial Sequence
  Synthetic polynucleotide
atcatctcaccttgcctcctggcttcaggtctcccagacctgcaggtgcgcatgcgcaagatgcgcatgcgcatcgtgcgcatgcgcagactgcgcatgcgcactatgcgcatgcgcaacttgcgcatgcgcatgctgcgcatgcgcagtatgcgcatgcgcaggcgcgccatgcttcatcagactct

SEQ ID NO: 7807 - DNA, 188 bp, Artificial Sequence; identical to SEQ ID NO: 7806
  Synthetic polynucleotide

SEQ ID NO: 7808 - DNA, 196 bp, Artificial Sequence
  Synthetic polynucleotide
atcatctcaccttgcctcctgcttcctcaaacccacttcctgcagggggtcacgtggccagagggtcacgtggcctcggggtcacgtggccgacgggtcacgtggccctagggtcacgtggccactgggtcacgtggcctgcgggtcacgtggccgtagggtcacgtggccggcgcgccatgcttcatcagactct

SEQ ID NO: 7809 - DNA, 196 bp, Artificial Sequence; identical to SEQ ID NO: 7808
  Synthetic polynucleotide

SEQ ID NO: 7810 - DNA, 197 bp, Artificial Sequence
  Synthetic polynucleotide
atcatctcaccttgcctcctgtcattgggcagtaaatgcctgcaggctgggaaatcccctaagactgggaaatcccctatcgctgggaaatcccctagacctgggaaatcccctactactgggaaatcccctaactctgggaaatcccctatgcctgggaaatcccctagtaggcgcgccatgcttcatcagactct

SEQ ID NO: 7811 - DNA, 197 bp, Artificial Sequence; identical to SEQ ID NO: 7810
  Synthetic polynucleotide

SEQ ID NO: 7812 - DNA, 190 bp, Artificial Sequence
  Synthetic polynucleotide
atcatctcaccttgcctcctgacccgaaagtggcgttgcctgcagggtgcgtgggcggggagagtgcgtgggcggggtcggtgcgtgggcgggggacgtgcgtgggcggggctagtgcgtgggcggggactgtgcgtgggcggggtgcgtgcgtgggcgggggtaggcgcgccatgcttcatcagactct

SEQ ID NO: 7813 - DNA, 190 bp, Artificial Sequence; identical to SEQ ID NO: 7812
  Synthetic polynucleotide

SEQ ID NO: 7814 - DNA, 156 bp, Artificial Sequence
  Synthetic polynucleotide
atcatctcaccttgcctcctgtcgtcttgtttctttgccctgcaggggggtcaaagaggggtcaatcgggggtcaagacggggtcaactaggggtcaaactggggtcaatgcggggtcaagtaggggtcaaggcgcgccatgcttcatcagactct

SEQ ID NO: 7815 - DNA, 156 bp, Artificial Sequence; identical to SEQ ID NO: 7814
  Synthetic polynucleotide

SEQ ID NO: 7816 - DNA, 156 bp, Artificial Sequence
  Synthetic polynucleotide
atcatctcaccttgcctcctgttgtctaactaggtacacctgcaggccatcccaagaccatcccatcgccatcccagacccatcccactaccatcccaactccatcccatgcccatcccagtaccatcccaggcgcgccatgcttcatcagactct

SEQ ID NO: 7817 - DNA, 156 bp, Artificial Sequence; identical to SEQ ID NO: 7816
  Synthetic polynucleotide

SEQ ID NO: 7818 - DNA, 185 bp, Artificial Sequence
  Synthetic polynucleotide
atcatctcaccttgcctcctggctatagttcgattacacctgcaggggagccataaaattcgagaggagccataaaattcgtcgggagccataaaattcggacggagccataaaattcgctaggagccataaaattcgactggagccataaaattcgtgcggcgcgccatgcttcatcagactct

SEQ ID NO: 7819 - DNA, 185 bp, Artificial Sequence; identical to SEQ ID NO: 7818
  Synthetic polynucleotide

SEQ ID NO: 7820 - DNA, 188 bp, Artificial Sequence
  Synthetic polynucleotide
atcatctcaccttgcctcctgcgcatttccacatatcacctgcaggcaagatggcggcagacaagatggcggctcgcaagatggcggcgaccaagatggcggcctacaagatggcggcactcaagatggcggctgccaagatggcggcgtacaagatggcggcggcgcgccatgcttcatcagactct

SEQ ID NO: 7821 - DNA, 188 bp, Artificial Sequence; identical to SEQ ID NO: 7820
  Synthetic polynucleotide

SEQ ID NO: 7822 - DNA, 172 bp, Artificial Sequence
  Synthetic polynucleotide
atcatctcaccttgcctcctggaattaaatcgccctagcctgcaggcgcgagatttagacgcgagattttcgcgcgagatttgaccgcgagatttctacgcgagatttactcgcgagattttgccgcgagatttgtacgcgagatttggcgcgccatgcttcatcagactct

SEQ ID NO: 7823 - DNA, 172 bp, Artificial Sequence; identical to SEQ ID NO: 7822
  Synthetic polynucleotide

SEQ ID NO: 7824 - DNA, 196 bp, Artificial Sequence
  Synthetic polynucleotide
atcatctcaccttgcctcctggttggacctgataacagcctgcaggctctccctttcccagactctccctttccctcgctctccctttcccgacctctccctttcccctactctccctttcccactctctccctttccctgcctctccctttcccgtactctccctttcccggcgcgccatgcttcatcagactct

SEQ ID NO: 7825 - DNA, 196 bp, Artificial Sequence; identical to SEQ ID NO: 7824
  Synthetic polynucleotide

SEQ ID NO: 7826 - DNA, 156 bp, Artificial Sequence
  Synthetic polynucleotide
atcatctcaccttgcctcctgaatagctttcatctacgcctgcaggggggtcagagaggggtcagtcgggggtcaggacggggtcagctaggggtcagactggggtcagtgcggggtcaggtaggggtcagggcgcgccatgcttcatcagactct

SEQ ID NO: 7827 - DNA, 156 bp, Artificial Sequence; identical to SEQ ID NO: 7826
  Synthetic polynucleotide

SEQ ID NO: 7828 - DNA, 180 bp, Artificial Sequence
  Synthetic polynucleotide
atcatctcaccttgcctcctgcctctcttaagtgtaatcctgcaggtgcgcaggcgcagatgcgcaggcgctcgtgcgcaggcgcgactgcgcaggcgcctatgcgcaggcgcacttgcgcaggcgctgctgcgcaggcgcgtatgcgcaggcgcggcgcgccatgcttcatcagactct

SEQ ID NO: 7829 - DNA, 180 bp, Artificial Sequence; identical to SEQ ID NO: 7828
  Synthetic polynucleotide

SEQ ID NO: 7830 - DNA, 186 bp, Artificial Sequence
  Synthetic polynucleotide
atcatctcaccttgcctcctgctacagttgcaccattgcctgcaggtgcgtgggcgggggggggggagatgcgtgggcgggggggggggtcgtgcgtgggcggggggggggggactgcgtgggcgggggggggggctatgcgtgggcgggggggggggactggcgcgccatgcttcatcagactct

SEQ ID NO: 7831 - DNA, 186 bp, Artificial Sequence; identical to SEQ ID NO: 7830
  Synthetic polynucleotide

SEQ ID NO: 7832 - DNA, 180 bp, Artificial Sequence
  Synthetic polynucleotide
atcatctcaccttgcctcctgctgacttcatacagtctcctgcagggccatatggtgagagccatatggtgtcggccatatggtggacgccatatggtgctagccatatggtgactgccatatggtgtgcgccatatggtggtagccatatggtgggcgcgccatgcttcatcagactct

SEQ ID NO: 7833 - DNA, 180 bp, Artificial Sequence; identical to SEQ ID NO: 7832
  Synthetic polynucleotide

SEQ ID NO: 7834 - DNA, 156 bp, Artificial Sequence
  Synthetic polynucleotide
atcatctcaccttgcctcctgacctcctcccaagcttacctgcaggggggtcacagaggggtcactcgggggtcacgacggggtcacctaggggtcacactggggtcactgcggggtcacgtaggggtcacggcgcgccatgcttcatcagactct

SEQ ID NO: 7835 - DNA, 156 bp, Artificial Sequence; identical to SEQ ID NO: 7834
  Synthetic polynucleotide

SEQ ID NO: 7836 - DNA, 156 bp, Artificial Sequence
  Synthetic polynucleotide
atcatctcaccttgcctcctgacttgtagttgccggagcctgcaggggccgttgagaggccgttgtcgggccgttggacggccgttgctaggccgttgactggccgttgtgcggccgttggtaggccgttgggcgcgccatgcttcatcagactct

SEQ ID NO: 7837 - DNA, 156 bp, Artificial Sequence; identical to SEQ ID NO: 7836
  Synthetic polynucleotide

SEQ ID NO: 7838 - DNA, 190 bp, Artificial Sequence
  Synthetic polynucleotide
atcatctcaccttgcctcctgattgtctctaaggagtccctgcaggaggattgtgcaataagaaggattgtgcaatatcgaggattgtgcaatagacaggattgtgcaatactaaggattgtgcaataactaggattgtgcaatatgcaggattgtgcaatagtaggcgcgccatgcttcatcagactct

SEQ ID NO: 7839 - DNA, 190 bp, Artificial Sequence; identical to SEQ ID NO: 7838
  Synthetic polynucleotide

SEQ ID NO: 7840 - DNA, 164 bp, Artificial Sequence
  Synthetic polynucleotide
atcatctcaccttgcctcctggtgacccgcaaatggcacctgcaggttaatgaccagattaatgacctcgttaatgaccgacttaatgaccctattaatgaccactttaatgacctgcttaatgaccgtattaatgaccggcgcgccatgcttcatcagactct

SEQ ID NO: 7841 - DNA, 164 bp, Artificial Sequence; identical to SEQ ID NO: 7840
  Synthetic polynucleotide

SEQ ID NO: 7842 - DNA, 190 bp, Artificial Sequence
  Synthetic polynucleotide
atcatctcaccttgcctcctgtcaatgacgagtatggccctgcaggaaaaaatatttactagaaaaaaatatttacttcgaaaaaatatttactgacaaaaaatatttactctaaaaaaatatttactactaaaaaatatttacttgcaaaaaatatttactgtaggcgcgccatgcttcatcagactct

SEQ ID NO: 7843 - DNA, 190 bp, Artificial Sequence; identical to SEQ ID NO: 7842
  Synthetic polynucleotide

SEQ ID NO: 7844 - DNA, 191 bp, Artificial Sequence
  Synthetic polynucleotide
atcatctcaccttgcctcctgcgcgtaacttggattgccctgcaggagtatttaattaattcgagaagtatttaattaattcgtcgagtatttaattaattcggacagtatttaattaattcgctaagtatttaattaattcgactagtatttaattaattcgtgcggcgcgccatgcttcatcagactct

SEQ ID NO: 7845 - DNA, 191 bp, Artificial Sequence; identical to SEQ ID NO: 7844
  Synthetic polynucleotide

SEQ ID NO: 7846 - DNA, 172 bp, Artificial Sequence
  Synthetic polynucleotide
atcatctcaccttgcctcctgggcgcgttatggcatcacctgcaggaccaattagcagaaccaattagctcgaccaattagcgacaccaattagcctaaccaattagcactaccaattagctgcaccaattagcgtaaccaattagcggcgcgccatgcttcatcagactct

SEQ ID NO: 7847 - DNA, 172 bp, Artificial Sequence; identical to SEQ ID NO: 7846
  Synthetic polynucleotide

SEQ ID NO: 7848 - DNA, 164 bp, Artificial Sequence
  Synthetic polynucleotide
atcatctcaccttgcctcctgcacaggagtattggactcctgcaggcttatctctagacttatctcttcgcttatctctgaccttatctctctacttatctctactcttatctcttgccttatctctgtacttatctctggcgcgccatgcttcatcagactct

SEQ ID NO: 7849 - DNA, 164 bp, Artificial Sequence; identical to SEQ ID NO: 7848
  Synthetic polynucleotide

SEQ ID NO: 7850 - DNA, 188 bp, Artificial Sequence
  Synthetic polynucleotide
atcatctcaccttgcctcctggtctgttgaccgattgacctgcaggtacttccgggttagatacttccgggtttcgtacttccgggttgactacttccgggttctatacttccgggttacttacttccgggtttgctacttccgggttgtatacttccgggttggcgcgccatgcttcatcagactct

SEQ ID NO: 7851 - DNA, 188 bp, Artificial Sequence; identical to SEQ ID NO: 7850
  Synthetic polynucleotide

SEQ ID NO: 7852 - DNA, 196 bp, Artificial Sequence
  Synthetic polynucleotide
atcatctcaccttgcctcctggagaaagcggcgtataccctgcaggccttcacttggggagaccttcacttggggtcgccttcacttgggggacccttcacttggggctaccttcacttggggactccttcacttggggtgcccttcacttgggggtaccttcacttggggggcgcgccatgcttcatcagactct

SEQ ID NO: 7853 - DNA, 196 bp, Artificial Sequence; identical to SEQ ID NO: 7852
  Synthetic polynucleotide

SEQ ID NO: 7854 - DNA, 190 bp, Artificial Sequence
  Synthetic polynucleotide
atcatctcaccttgcctcctgacgagggttagtagcgtcctgcaggcactagatggcagcagacactagatggcagctcgcactagatggcagcgaccactagatggcagcctacactagatggcagcactcactagatggcagctgccactagatggcagcgtaggcgcgccatgcttcatcagactct

SEQ ID NO: 7855 - DNA, 190 bp, Artificial Sequence; identical to SEQ ID NO: 7854
  Synthetic polynucleotide

SEQ ID NO: 7856 - DNA, 180 bp, Artificial Sequence
  Synthetic polynucleotide
atcatctcaccttgcctcctgatgccaaaccaatagtacctgcaggcagcaccccggagacagcaccccggtcgcagcaccccgggaccagcaccccggctacagcaccccggactcagcaccccggtgccagcaccccgggtacagcaccccggggcgcgccatgcttcatcagactct

SEQ ID NO: 7857 - DNA, 180 bp, Artificial Sequence; identical to SEQ ID NO: 7856
  Synthetic polynucleotide

SEQ ID NO: 7858 - DNA, 180 bp, Artificial Sequence
  Synthetic polynucleotide
atcatctcaccttgcctcctgagtgcgccagtcgagatcctgcaggatgtaaacaaaagaatgtaaacaaatcgatgtaaacaaagacatgtaaacaaactaatgtaaacaaaactatgtaaacaaatgcatgtaaacaaagtaatgtaaacaaaggcgcgccatgcttcatcagactct

SEQ ID NO: 7859 - DNA, 180 bp, Artificial Sequence; identical to SEQ ID NO: 7858
  Synthetic polynucleotide

SEQ ID NO: 7860 - DNA, 172 bp, Artificial Sequence
  Synthetic polynucleotide
atcatctcaccttgcctcctgagagagtcacgctacggcctgcaggagtaattagcagaagtaattagctcgagtaattagcgacagtaattagcctaagtaattagcactagtaattagctgcagtaattagcgtaagtaattagcggcgcgccatgcttcatcagactct

SEQ ID NO: 7861 - DNA, 172 bp, Artificial Sequence; identical to SEQ ID NO: 7860
  Synthetic polynucleotide

SEQ ID NO: 7862 - DNA, 196 bp, Artificial Sequence
  Synthetic polynucleotide
atcatctcaccttgcctcctgtcggtagtgacgctcaacctgcaggaaattaattaatcagaaaattaattaatctcgaaattaattaatcgacaaattaattaatcctaaaattaattaatcactaaattaattaatctgcaaattaattaatcgtaaaattaattaatcggcgcgccatgcttcatcagactct

SEQ ID NO: 7863 - DNA, 196 bp, Artificial Sequence; identical to SEQ ID NO: 7862
  Synthetic polynucleotide

SEQ ID NO: 7864 - DNA, 188 bp, Artificial Sequence
  Synthetic polynucleotide
atcatctcaccttgcctcctgtgccgagaaattcgtgtcctgcaggggcgaccaccgaagaggcgaccaccgatcgggcgaccaccgagacggcgaccaccgactaggcgaccaccgaactggcgaccaccgatgcggcgaccaccgagtaggcgaccaccgaggcgcgccatgcttcatcagactct

SEQ ID NO: 7865 - DNA, 188 bp, Artificial Sequence; identical to SEQ ID NO: 7864
  Synthetic polynucleotide

SEQ ID NO: 7866 - DNA, 190 bp, Artificial Sequence
  Synthetic polynucleotide
atcatctcaccttgcctcctgtcctcgcctatagttagcctgcaggtgtttattgtttacagatgtttattgtttactcgtgtttattgtttacgactgtttattgtttacctatgtttattgtttacacttgtttattgtttactgctgtttattgtttacgtaggcgcgccatgcttcatcagactct

SEQ ID NO: 7867 - DNA, 190 bp, Artificial Sequence; identical to SEQ ID NO: 7866
  Synthetic polynucleotide

SEQ ID NO: 7868 - DNA, 172 bp, Artificial Sequence
  Synthetic polynucleotide
atcatctcaccttgcctcctgtctccttcagagcatcacctgcaggtaatcgattaagataatcgattatcgtaatcgattagactaatcgattactataatcgattaacttaatcgattatgctaatcgattagtataatcgattaggcgcgccatgcttcatcagactct

SEQ ID NO: 7869 - DNA, 172 bp, Artificial Sequence; identical to SEQ ID NO: 7868
  Synthetic polynucleotide

SEQ ID NO: 7870 - DNA, 188 bp, Artificial Sequence
  Synthetic polynucleotide
atcatctcaccttgcctcctgcttgcgccagaagtgtacctgcaggtgccccagggcaagatgccccagggcatcgtgccccagggcagactgccccagggcactatgccccagggcaacttgccccagggcatgctgccccagggcagtatgccccagggcaggcgcgccatgcttcatcagactct

SEQ ID NO: 7871 - DNA, 188 bp, Artificial Sequence; identical to SEQ ID NO: 7870
  Synthetic polynucleotide

SEQ ID NO: 7872 - DNA, 190 bp, Artificial Sequence
  Synthetic polynucleotide
atcatctcaccttgcctcctggactgagtgagcaatctcctgcaggaaatggcgccatttagaaaatggcgccattttcgaaatggcgccatttgacaaatggcgccatttctaaaatggcgccatttactaaatggcgccattttgcaaatggcgccatttgtaggcgcgccatgcttcatcagactct

SEQ ID NO: 7873 - DNA, 190 bp, Artificial Sequence; identical to SEQ ID NO: 7872
  Synthetic polynucleotide

SEQ ID NO: 7874 - DNA, 190 bp, Artificial Sequence
  Synthetic polynucleotide
atcatctcaccttgcctcctgaactcgcccaagagacgcctgcaggggccatataaggacagaggccatataaggactcgggccatataaggacgacggccatataaggacctaggccatataaggacactggccatataaggactgcggccatataaggacgtaggcgcgccatgcttcatcagactct

SEQ ID NO: 7875 - DNA, 190 bp, Artificial Sequence; identical to SEQ ID NO: 7874
  Synthetic polynucleotide

SEQ ID NO: 7876 - DNA, 191 bp, Artificial Sequence
  Synthetic polynucleotide
atcatctcaccttgcctcctgctagtaaagtgtgaagccctgcaggtgtttacaattgtttatagatgtttacaattgtttattcgtgtttacaattgtttatgactgtttacaattgtttatctatgtttacaattgtttatacttgtttacaattgtttattgcggcgcgccatgcttcatcagactct

SEQ ID NO: 7877 - DNA, 191 bp, Artificial Sequence; identical to SEQ ID NO: 7876
  Synthetic polynucleotide

SEQ ID NO: 7878 - DNA, 185 bp, Artificial Sequence
  Synthetic polynucleotide
atcatctcaccttgcctcctggcatatcctcggactcgcctgcaggtctttatatataaataagatctttatatataaatatcgtctttatatataaatagactctttatatataaatactatctttatatataaataacttctttatatataaatatgcggcgcgccatgcttcatcagactct

SEQ ID NO: 7879 - DNA, 185 bp, Artificial Sequence; identical to SEQ ID NO: 7878
  Synthetic polynucleotide

SEQ ID NO: 7880 - DNA, 188 bp, Artificial Sequence
  Synthetic polynucleotide
atcatctcaccttgcctcctgtggaagacctactccctcctgcaggcctgacgcaatgagacctgacgcaatgtcgcctgacgcaatggaccctgacgcaatgctacctgacgcaatgactcctgacgcaatgtgccctgacgcaatggtacctgacgcaatgggcgcgccatgcttcatcagactct

SEQ ID NO: 7881 - DNA, 188 bp, Artificial Sequence; identical to SEQ ID NO: 7880
  Synthetic polynucleotide

SEQ ID NO: 7882 - DNA, 196 bp, Artificial Sequence
  Synthetic polynucleotide
atcatctcaccttgcctcctggcagtatctttaagcggcctgcaggtcactaatcccacagatcactaatcccactcgtcactaatcccacgactcactaatcccacctatcactaatcccacacttcactaatcccactgctcactaatcccacgtatcactaatcccacggcgcgccatgcttcatcagactct

SEQ ID NO: 7883 - DNA, 196 bp, Artificial Sequence; identical to SEQ ID NO: 7882
  Synthetic polynucleotide

SEQ ID NO: 7884 - DNA, 197 bp, Artificial Sequence
  Synthetic polynucleotide
atcatctcaccttgcctcctggctactaaggcacaacgcctgcaggccgccagggggcgccagaccgccagggggcgcctcgccgccagggggcgccgacccgccagggggcgccctaccgccagggggcgccactccgccagggggcgcctgcccgccagggggcgccgtaggcgcgccatgcttcatcagactct

SEQ ID NO: 7885 - DNA, 197 bp, Artificial Sequence; identical to SEQ ID NO: 7884
  Synthetic polynucleotide

SEQ ID NO: 7886 - DNA, 156 bp, Artificial Sequence
  Synthetic polynucleotide
atcatctcaccttgcctcctgtccatccaccgaactctcctgcagggccagctgagagccagctgtcggccagctggacgccagctgctagccagctgactgccagctgtgcgccagctggtagccagctgggcgcgccatgcttcatcagactct

SEQ ID NO: 7887 - DNA, 156 bp, Artificial Sequence; identical to SEQ ID NO: 7886
  Synthetic polynucleotide

SEQ ID NO: 7888 - DNA, 191 bp, Artificial Sequence
  Synthetic polynucleotide
atcatctcaccttgcctcctgggcagtagaatatcgcccctgcagggccttctgggaattgtagttcagagccttctgggaattgtagttctcggccttctgggaattgtagttcgacgccttctgggaattgtagttcctagccttctgggaattgtagttcactggcgcgccatgcttcatcagactct

SEQ ID NO: 7889 - DNA, 191 bp, Artificial Sequence; identical to SEQ ID NO: 7888
  Synthetic polynucleotide

SEQ ID NO: 7890 - DNA, 180 bp, Artificial Sequence
  Synthetic polynucleotide
atcatctcaccttgcctcctggactagtcgtgtgcaaacctgcaggaccacgtggccagaaccacgtggcctcgaccacgtggccgacaccacgtggccctaaccacgtggccactaccacgtggcctgcaccacgtggccgtaaccacgtggccggcgcgccatgcttcatcagactct

SEQ ID NO: 7891 - DNA, 180 bp, Artificial Sequence; identical to SEQ ID NO: 7890
  Synthetic polynucleotide

SEQ ID NO: 7892 - DNA, 180 bp, Artificial Sequence
  Synthetic polynucleotide
atcatctcaccttgcctcctgtcggaagagcccgtagtcctgcaggtacttccttatagatacttccttattcgtacttccttatgactacttccttatctatacttccttatacttacttccttattgctacttccttatgtatacttccttatggcgcgccatgcttcatcagactct

SEQ ID NO: 7893 - DNA, 180 bp, Artificial Sequence; identical to SEQ ID NO: 7892
  Synthetic polynucleotide

SEQ ID NO: 7894 - DNA, 164 bp, Artificial Sequence
  Synthetic polynucleotide
atcatctcaccttgcctcctggcacacatacctccgaacctgcaggttaattggcagattaattggctcgttaattggcgacttaattggcctattaattggcactttaattggctgcttaattggcgtattaattggcggcgcgccatgcttcatcagactct

SEQ ID NO: 7895 - DNA, 164 bp, Artificial Sequence; identical to SEQ ID NO: 7894
  Synthetic polynucleotide

SEQ ID NO: 7896 - DNA, 172 bp, Artificial Sequence
  Synthetic polynucleotide
atcatctcaccttgcctcctgcaatcatgtcgccaaagcctgcaggcgccgccgccagacgccgccgcctcgcgccgccgccgaccgccgccgccctacgccgccgccactcgccgccgcctgccgccgccgccgtacgccgccgccggcgcgccatgcttcatcagactct

SEQ ID NO: 7897 - DNA, 172 bp, Artificial Sequence; identical to SEQ ID NO: 7896
  Synthetic polynucleotide

SEQ ID NO: 7898 - DNA, 191 bp, Artificial Sequence
  Synthetic polynucleotide
atcatctcaccttgcctcctgataacccttcaaacgcacctgcaggtgcattaattaatgcgaagatgcattaattaatgcgatcgtgcattaattaatgcgagactgcattaattaatgcgactatgcattaattaatgcgaacttgcattaattaatgcgatgcggcgcgccatgcttcatcagactct

SEQ ID NO: 7899 - DNA, 191 bp, Artificial Sequence; identical to SEQ ID NO: 7898
  Synthetic polynucleotide

SEQ ID NO: 7900 - DNA, 185 bp, Artificial Sequence
  Synthetic polynucleotide
atcatctcaccttgcctcctgactcagtacgcttattacctgcaggaacaatgaacattgttagaaacaatgaacattgtttcgaacaatgaacattgttgacaacaatgaacattgttctaaacaatgaacattgttactaacaatgaacattgtttgcggcgcgccatgcttcatcagactct

SEQ ID NO: 7901 - DNA, 185 bp, Artificial Sequence; identical to SEQ ID NO: 7900
  Synthetic polynucleotide

SEQ ID NO: 7902 - DNA, 156 bp, Artificial Sequence
  Synthetic polynucleotide
atcatctcaccttgcctcctgccagcaacaggtacactcctgcaggctaatggcagactaatggctcgctaatggcgacctaatggcctactaatggcactctaatggctgcctaatggcgtactaatggcggcgcgccatgcttcatcagactct

SEQ ID NO: 7903 - DNA, 156 bp, Artificial Sequence; identical to SEQ ID NO: 7902
  Synthetic polynucleotide

SEQ ID NO: 7904 - DNA, 191 bp, Artificial Sequence
  Synthetic polynucleotide
atcatctcaccttgcctcctgcaaccgtgccgtatcgtcctgcaggtgacctctactgaccccagatgacctctactgacccctcgtgacctctactgaccccgactgacctctactgaccccctatgacctctactgaccccacttgacctctactgacccctgcggcgcgccatgcttcatcagactct

SEQ ID NO: 7905 - DNA, 191 bp, Artificial Sequence; identical to SEQ ID NO: 7904
  Synthetic polynucleotide

SEQ ID NO: 7906 - DNA, 196 bp, Artificial Sequence
  Synthetic polynucleotide
atcatctcaccttgcctcctgatggatacgatttgcttcctgcaggaagttcaaggtcaagaaagttcaaggtcatcgaagttcaaggtcagacaagttcaaggtcactaaagttcaaggtcaactaagttcaaggtcatgcaagttcaaggtcagtaaagttcaaggtcaggcgcgccatgcttcatcagactct

SEQ ID NO: 7907 - DNA, 196 bp, Artificial Sequence; identical to SEQ ID NO: 7906
  Synthetic polynucleotide

SEQ ID NO: 7908 - DNA, 180 bp, Artificial Sequence
  Synthetic polynucleotide
atcatctcaccttgcctcctggccgcattcttcacaatcctgcaggtgggtgtggccagatgggtgtggcctcgtgggtgtggccgactgggtgtggccctatgggtgtggccacttgggtgtggcctgctgggtgtggccgtatgggtgtggccggcgcgccatgcttcatcagactct

SEQ ID NO: 7909 - DNA, 180 bp, Artificial Sequence; identical to SEQ ID NO: 7908
  Synthetic polynucleotide

SEQ ID NO: 7910 - DNA, 188 bp, Artificial Sequence
  Synthetic polynucleotide
atcatctcaccttgcctcctgggatcgtgcgccgtatacctgcagggcttttcccacaagagcttttcccacatcggcttttcccacagacgcttttcccacactagcttttcccacaactgcttttcccacatgcgcttttcccacagtagcttttcccacaggcgcgccatgcttcatcagactct

SEQ ID NO: 7911 - DNA, 188 bp, Artificial Sequence; identical to SEQ ID NO: 7910
  Synthetic polynucleotide

SEQ ID NO: 7912 - DNA, 185 bp, Artificial Sequence
  Synthetic polynucleotide
atcatctcaccttgcctcctgtaataacccacggagtccctgcaggaaaggtcaaaaggtcaagaaaaggtcaaaaggtcatcgaaaggtcaaaaggtcagacaaaggtcaaaaggtcactaaaaggtcaaaaggtcaactaaaggtcaaaaggtcatgcggcgcgccatgcttcatcagactct

SEQ ID NO: 7913 - DNA, 185 bp, Artificial Sequence; identical to SEQ ID NO: 7912
  Synthetic polynucleotide

SEQ ID NO: 7914 - DNA, 188 bp, Artificial Sequence
  Synthetic polynucleotide
atcatctcaccttgcctcctggaacctcaaagctttcccctgcaggaaataagtatatagaaaataagtatattcgaaataagtatatgacaaataagtatatctaaaataagtatatactaaataagtatattgcaaataagtatatgtaaaataagtatatggcgcgccatgcttcatcagactct

SEQ ID NO: 7915 - DNA, 188 bp, Artificial Sequence; identical to SEQ ID NO: 7914
  Synthetic polynucleotide

SEQ ID NO: 7916 - DNA, 197 bp, Artificial Sequence
  Synthetic polynucleotide
atcatctcaccttgcctcctgctctcatgagatcgcgccctgcaggcagttgctaggcaacgggagacagttgctaggcaacgggtcgcagttgctaggcaacggggaccagttgctaggcaacgggctacagttgctaggcaacgggactcagttgctaggcaacgggtgcggcgcgccatgcttcatcagactct

SEQ ID NO: 7917 - DNA, 197 bp, Artificial Sequence; identical to SEQ ID NO: 7916
  Synthetic polynucleotide

SEQ ID NO: 7918 - DNA, 188 bp, Artificial Sequence
  Synthetic polynucleotide
atcatctcaccttgcctcctgtaagatggatgagggcgcctgcaggccggacacaatcagaccggacacaatctcgccggacacaatcgacccggacacaatcctaccggacacaatcactccggacacaatctgcccggacacaatcgtaccggacacaatcggcgcgccatgcttcatcagactct

SEQ ID NO: 7919 - DNA, 188 bp, Artificial Sequence; identical to SEQ ID NO: 7918
  Synthetic polynucleotide

SEQ ID NO: 7920 - DNA, 180 bp, Artificial Sequence
  Synthetic polynucleotide
atcatctcaccttgcctcctgggctcattcaggacgatcctgcaggaccacgtggctagaaccacgtggcttcgaccacgtggctgacaccacgtggctctaaccacgtggctactaccacgtggcttgcaccacgtggctgtaaccacgtggctggcgcgccatgcttcatcagactct

SEQ ID NO: 7921 - DNA, 180 bp, Artificial Sequence; identical to SEQ ID NO: 7920
  Synthetic polynucleotide

SEQ ID NO: 7922 - DNA, 172 bp, Artificial Sequence
  Synthetic polynucleotide
atcatctcaccttgcctcctgatgaagtgtactcgtaccctgcaggatagataagaagaatagataagatcgatagataagagacatagataagactaatagataagaactatagataagatgcatagataagagtaatagataagaggcgcgccatgcttcatcagactct

SEQ ID NO: 7923 - DNA, 172 bp, Artificial Sequence; identical to SEQ ID NO: 7922
  Synthetic polynucleotide

SEQ ID NO: 7924 - DNA, 148 bp, Artificial Sequence
  Synthetic polynucleotide
atcatctcaccttgcctcctgagcttcgatcaaagttgcctgcaggacaggtgagaacaggtgtcgacaggtggacacaggtgctaacaggtgactacaggtgtgcacaggtggtaacaggtgggcgcgccatgcttcatcagactct

SEQ ID NO: 7925 - DNA, 148 bp, Artificial Sequence; identical to SEQ ID NO: 7924
  Synthetic polynucleotide

SEQ ID NO: 7926 - DNA, 196 bp, Artificial Sequence
  Synthetic polynucleotide
atcatctcaccttgcctcctgcagtggtgaatattgcacctgcaggggtcacgtgacccagaggtcacgtgaccctcgggtcacgtgacccgacggtcacgtgacccctaggtcacgtgacccactggtcacgtgaccctgcggtcacgtgacccgtaggtcacgtgacccggcgcgccatgcttcatcagactct

SEQ ID NO: 7927 - DNA, 196 bp, Artificial Sequence; identical to SEQ ID NO: 7926
  Synthetic polynucleotide

SEQ ID NO: 7928 - DNA, 197 bp, Artificial Sequence
  Synthetic polynucleotide
atcatctcaccttgcctcctgactttcacaccaccggccctgcaggtgaccttgaaatgaccttagatgaccttgaaatgacctttcgtgaccttgaaatgaccttgactgaccttgaaatgaccttctatgaccttgaaatgaccttacttgaccttgaaatgacctttgcggcgcgccatgcttcatcagactct

SEQ ID NO: 7929 - DNA, 197 bp, Artificial Sequence; identical to SEQ ID NO: 7928
  Synthetic polynucleotide

SEQ ID NO: 7930 - DNA, 179 bp, Artificial Sequence
  Synthetic polynucleotide
atcatctcaccttgcctcctgaggcgcctatagatcgacctgcaggcggccccgccccccccctggccccagacggccccgccccccccctggcccctcgcggccccgccccccccctggccccgaccggccccgccccccccctggccccctaggcgcgccatgcttcatcagactct

SEQ ID NO: 7931 - DNA, 179 bp, Artificial Sequence; identical to SEQ ID NO: 7930
  Synthetic polynucleotide

SEQ ID NO: 7932 - DNA, 164 bp, Artificial Sequence
  Synthetic polynucleotide
atcatctcaccttgcctcctgagacatcttctgagacacctgcagggttgcgtgcagagttgcgtgctcggttgcgtgcgacgttgcgtgcctagttgcgtgcactgttgcgtgctgcgttgcgtgcgtagttgcgtgcggcgcgccatgcttcatcagactct

SEQ ID NO: 7933 - DNA, 164 bp, Artificial Sequence; identical to SEQ ID NO: 7932
  Synthetic polynucleotide

SEQ ID NO: 7934 - DNA, 197 bp, Artificial Sequence
  Synthetic polynucleotide
atcatctcaccttgcctcctgatcttccgcgtaagccacctgcaggaaagggctgcggcccagaaaagggctgcggccctcgaaagggctgcggcccgacaaagggctgcggcccctaaaagggctgcggcccactaaagggctgcggccctgcaaagggctgcggcccgtaggcgcgccatgcttcatcagactct

SEQ ID NO: 7935 - DNA, 197 bp, Artificial Sequence; identical to SEQ ID NO: 7934
  Synthetic polynucleotide

SEQ ID NO: 7936 - DNA, 148 bp, Artificial Sequence
  Synthetic polynucleotide
atcatctcaccttgcctcctggaccactaagaaaggttcctgcaggtatcattagatatcatttcgtatcattgactatcattctatatcattacttatcatttgctatcattgtatatcattggcgcgccatgcttcatcagactct

SEQ ID NO: 7937 - DNA, 148 bp, Artificial Sequence; identical to SEQ ID NO: 7936
  Synthetic polynucleotide

SEQ ID NO: 7938 - DNA, 180 bp, Artificial Sequence
  Synthetic polynucleotide
atcatctcaccttgcctcctgcacttcaagtaccgtaccctgcaggccaaggtcacaagaccaaggtcacatcgccaaggtcacagacccaaggtcacactaccaaggtcacaactccaaggtcacatgcccaaggtcacagtaccaaggtcacaggcgcgccatgcttcatcagactct

SEQ ID NO: 7939 - DNA, 180 bp, Artificial Sequence; identical to SEQ ID NO: 7938
  Synthetic polynucleotide

SEQ ID NO: 7940 - DNA, 191 bp, Artificial Sequence
  Synthetic polynucleotide
atcatctcaccttgcctcctgatagatggccctttgtgcctgcaggaaaatacatgtaaaaatagaaaaatacatgtaaaaattcgaaaatacatgtaaaaatgacaaaatacatgtaaaaatctaaaaatacatgtaaaaatactaaaatacatgtaaaaattgcggcgcgccatgcttcatcagactct

SEQ ID NO: 7941 - DNA, 191 bp, Artificial Sequence; identical to SEQ ID NO: 7940
  Synthetic polynucleotide

SEQ ID NO: 7942 - DNA, 172 bp, Artificial Sequence
  Synthetic polynucleotide
atcatctcaccttgcctcctgggcaaccatttaattctcctgcagggagcacgtggagagagcacgtggtcggagcacgtgggacgagcacgtggctagagcacgtggactgagcacgtggtgcgagcacgtgggtagagcacgtggggcgcgccatgcttcatcagactct

SEQ ID NO: 7943 - DNA, 172 bp, Artificial Sequence; identical to SEQ ID NO: 7942
  Synthetic polynucleotide

SEQ ID NO: 7944 - DNA, 164 bp, Artificial Sequence
  Synthetic polynucleotide
atcatctcaccttgcctcctgcaagatactggtctgcccctgcaggtgagcacgaagatgagcacgatcgtgagcacgagactgagcacgactatgagcacgaacttgagcacgatgctgagcacgagtatgagcacgaggcgcgccatgcttcatcagactct

SEQ ID NO: 7945 - DNA, 164 bp, Artificial Sequence; identical to SEQ ID NO: 7944
  Synthetic polynucleotide

SEQ ID NO: 7946 - DNA, 197 bp, Artificial Sequence
  Synthetic polynucleotide
atcatctcaccttgcctcctgtggtgcacgtgtattcccctgcaggtgaccgccagtgaccccaagatgaccgccagtgaccccatcgtgaccgccagtgaccccagactgaccgccagtgaccccactatgaccgccagtgaccccaacttgaccgccagtgaccccatgcggcgcgccatgcttcatcagactct

SEQ ID NO: 7947 - DNA, 197 bp, Artificial Sequence; identical to SEQ ID NO: 7946
  Synthetic polynucleotide

SEQ ID NO: 7948 - DNA, 172 bp, Artificial Sequence
  Synthetic polynucleotide
atcatctcaccttgcctcctggttacccaataagccgtcctgcagggcgggcgccgagagcgggcgccgtcggcgggcgccggacgcgggcgccgctagcgggcgccgactgcgggcgccgtgcgcgggcgccggtagcgggcgccgggcgcgccatgcttcatcagactct

SEQ ID NO: 7949 - DNA, 172 bp, Artificial Sequence; identical to SEQ ID NO: 7948
  Synthetic polynucleotide

SEQ ID NO: 7950 - DNA, 188 bp, Artificial Sequence
  Synthetic polynucleotide
atcatctcaccttgcctcctggtcaacatccactcatccctgcaggggggtggggattagaggggtggggatttcgggggtggggattgacggggtggggattctaggggtggggattactggggtggggatttgcggggtggggattgtaggggtggggattggcgcgccatgcttcatcagactct

SEQ ID NO: 7951 - DNA, 188 bp, Artificial Sequence; identical to SEQ ID NO: 7950
  Synthetic polynucleotide

SEQ ID NO: 7952 - DNA, 185 bp, Artificial Sequence
  Synthetic polynucleotide
atcatctcaccttgcctcctgcgttctgacaggttaatcctgcaggtctcaaaggtcacgagagatctcaaaggtcacgagtcgtctcaaaggtcacgaggactctcaaaggtcacgagctatctcaaaggtcacgagacttctcaaaggtcacgagtgcggcgcgccatgcttcatcagactct

SEQ ID NO: 7953 - DNA, 185 bp, Artificial Sequence; identical to SEQ ID NO: 7952
  Synthetic polynucleotide

SEQ ID NO: 7954 - DNA, 191 bp, Artificial Sequence
  Synthetic polynucleotide
atcatctcaccttgcctcctgaactttctactgtgtgtcctgcaggatatatgataccctattagaatatatgataccctatttcgatatatgataccctattgacatatatgataccctattctaatatatgataccctattactatatatgataccctatttgcggcgcgccatgcttcatcagactct

SEQ ID NO: 7955 - DNA, 191 bp, Artificial Sequence; identical to SEQ ID NO: 7954
  Synthetic polynucleotide

SEQ ID NO: 7956 - DNA, 196 bp, Artificial Sequence
  Synthetic polynucleotide
atcatctcaccttgcctcctgaccaccatagcgcgcttcctgcaggctgacctctggccagactgacctctggcctcgctgacctctggccgacctgacctctggccctactgacctctggccactctgacctctggcctgcctgacctctggccgtactgacctctggccggcgcgccatgcttcatcagactct

SEQ ID NO: 7957 - DNA, 196 bp, Artificial Sequence; identical to SEQ ID NO: 7956
  Synthetic polynucleotide

SEQ ID NO: 7958 - DNA, 156 bp, Artificial Sequence
  Synthetic polynucleotide
atcatctcaccttgcctcctggattaaagtgtcgatcacctgcaggtaatcaaaagataatcaaatcgtaatcaaagactaatcaaactataatcaaaacttaatcaaatgctaatcaaagtataatcaaaggcgcgccatgcttcatcagactct

SEQ ID NO: 7959 - DNA, 156 bp, Artificial Sequence; identical to SEQ ID NO: 7958
  Synthetic polynucleotide

SEQ ID NO: 7960 - DNA, 180 bp, Artificial Sequence
  Synthetic polynucleotide
atcatctcaccttgcctcctgaaacgtaccgataagcccctgcagggtgattggttaagagtgattggttatcggtgattggttagacgtgattggttactagtgattggttaactgtgattggttatgcgtgattggttagtagtgattggttaggcgcgccatgcttcatcagactct

SEQ ID NO: 7961 - DNA, 180 bp, Artificial Sequence; identical to SEQ ID NO: 7960
  Synthetic polynucleotide

SEQ ID NO: 7962 - DNA, 188 bp, Artificial Sequence
  Synthetic polynucleotide
atcatctcaccttgcctcctgccctatagttcggccaccctgcagggcggcgggcaatagagcggcgggcaattcggcggcgggcaatgacgcggcgggcaatctagcggcgggcaatactgcggcgggcaattgcgcggcgggcaatgtagcggcgggcaatggcgcgccatgcttcatcagactct

SEQ ID NO: 7963 - DNA, 188 bp, Artificial Sequence; identical to SEQ ID NO: 7962
  Synthetic polynucleotide

SEQ ID NO: 7964 - DNA, 148 bp, Artificial Sequence
  Synthetic polynucleotide
atcatctcaccttgcctcctgagaacccaccatcctcgcctgcaggtcataaaagatcataaatcgtcataaagactcataaactatcataaaacttcataaatgctcataaagtatcataaaggcgcgccatgcttcatcagactct

SEQ ID NO: 7965 - DNA, 148 bp, Artificial Sequence; identical to SEQ ID NO: 7964
  Synthetic polynucleotide

SEQ ID NO: 7966 - DNA, 164 bp, Artificial Sequence
  Synthetic polynucleotide
atcatctcaccttgcctcctggaattgtccgaattgggcctgcaggacaggtggtagaacaggtggttcgacaggtggtgacacaggtggtctaacaggtggtactacaggtggttgcacaggtggtgtaacaggtggtggcgcgccatgcttcatcagactct

SEQ ID NO: 7967 - DNA, 164 bp, Artificial Sequence; identical to SEQ ID NO: 7966
  Synthetic polynucleotide

SEQ ID NO: 7968 - DNA, 191 bp, Artificial Sequence
  Synthetic polynucleotide
atcatctcaccttgcctcctgcaatcgtttaccggttccctgcaggacgtatgtgcacatctgagaacgtatgtgcacatctgtcgacgtatgtgcacatctggacacgtatgtgcacatctgctaacgtatgtgcacatctgactacgtatgtgcacatctgtgcggcgcgccatgcttcatcagactct

SEQ ID NO: 7969 - DNA, 191 bp, Artificial Sequence; identical to SEQ ID NO: 7968
  Synthetic polynucleotide

SEQ ID NO: 7970 - DNA, 172 bp, Artificial Sequence
  Synthetic polynucleotide
atcatctcaccttgcctcctgcagatggtgaattaatccctgcaggggcaacgcccagaggcaacgccctcgggcaacgcccgacggcaacgcccctaggcaacgcccactggcaacgccctgcggcaacgcccgtaggcaacgcccggcgcgccatgcttcatcagactct

SEQ ID NO: 7971 - DNA, 172 bp, Artificial Sequence; identical to SEQ ID NO: 7970
  Synthetic polynucleotide

SEQ ID NO: 7972 - DNA, 186 bp, Artificial Sequence
  Synthetic polynucleotide
atcatctcaccttgcctcctgaatatacagtacatccgcctgcaggtttcacacctaggtgtgaaaagatttcacacctaggtgtgaaatcgtttcacacctaggtgtgaaagactttcacacctaggtgtgaaactatttcacacctaggtgtgaaaactggcgcgccatgcttcatcagactct

SEQ ID NO: 7973 - DNA, 186 bp, Artificial Sequence; identical to SEQ ID NO: 7972
  Synthetic polynucleotide

SEQ ID NO: 7974 - DNA, 186 bp, Artificial Sequence
  Synthetic polynucleotide
atcatctcaccttgcctcctgtggtcggcaacaccgatcctgcagggcttctgcacgtgacccggtagagcttctgcacgtgacccggttcggcttctgcacgtgacccggtgacgcttctgcacgtgacccggtctagcttctgcacgtgacccggtactggcgcgccatgcttcatcagactct

SEQ ID NO: 7975 - DNA, 186 bp, Artificial Sequence; identical to SEQ ID NO: 7974
  Synthetic polynucleotide

SEQ ID NO: 7976 - DNA, 164 bp, Artificial Sequence
  Synthetic polynucleotide
atcatctcaccttgcctcctgccgtgaatgggagtacccctgcaggttaaccaggagattaaccaggtcgttaaccagggacttaaccaggctattaaccaggactttaaccaggtgcttaaccagggtattaaccaggggcgcgccatgcttcatcagactct

SEQ ID NO: 7977 - DNA, 164 bp, Artificial Sequence; identical to SEQ ID NO: 7976
  Synthetic polynucleotide

SEQ ID NO: 7978 - DNA, 190 bp, Artificial Sequence
  Synthetic polynucleotide
atcatctcaccttgcctcctgttcatcggtaccagctacctgcagggaggtcaaaggtcaagagaggtcaaaggtcatcggaggtcaaaggtcagacgaggtcaaaggtcactagaggtcaaaggtcaactgaggtcaaaggtcatgcgaggtcaaaggtcagtaggcgcgccatgcttcatcagactct

SEQ ID NO: 7979 - DNA, 190 bp, Artificial Sequence; identical to SEQ ID NO: 7978
  Synthetic polynucleotide

SEQ ID NO: 7980 - DNA, 191 bp, Artificial Sequence
  Synthetic polynucleotide
atcatctcaccttgcctcctgatcataccgcaccctttcctgcaggatttttacatgtattttagaatttttacatgtatttttcgatttttacatgtattttgacatttttacatgtattttctaatttttacatgtattttactatttttacatgtatttttgcggcgcgccatgcttcatcagactct

SEQ ID NO: 7981 - DNA, 191 bp, Artificial Sequence; identical to SEQ ID NO: 7980
  Synthetic polynucleotide

SEQ ID NO: 7982 - DNA, 172 bp, Artificial Sequence
  Synthetic polynucleotide
atcatctcaccttgcctcctgggtagaggagggcgtaacctgcaggtttgtggttaagatttgtggttatcgtttgtggttagactttgtggttactatttgtggttaacttttgtggttatgctttgtggttagtatttgtggttaggcgcgccatgcttcatcagactct

SEQ ID NO: 7983 - DNA, 172 bp, Artificial Sequence; identical to SEQ ID NO: 7982
  Synthetic polynucleotide

SEQ ID NO: 7984 - DNA, 185 bp, Artificial Sequence
  Synthetic polynucleotide
atcatctcaccttgcctcctgtccgtaaatgactcctacctgcaggcaggtgacctttgagaagacaggtgacctttgagatcgcaggtgacctttgagagaccaggtgacctttgagactacaggtgacctttgagaactcaggtgacctttgagatgcggcgcgccatgcttcatcagactct

SEQ ID NO: 7985 - DNA, 185 bp, Artificial Sequence; identical to SEQ ID NO: 7984
  Synthetic polynucleotide

SEQ ID NO: 7986 - DNA, 164 bp, Artificial Sequence
  Synthetic polynucleotide
atcatctcaccttgcctcctggtcacgctgtacacgcacctgcaggcaacccaaaagacaacccaaatcgcaacccaaagaccaacccaaactacaacccaaaactcaacccaaatgccaacccaaagtacaacccaaaggcgcgccatgcttcatcagactct

SEQ ID NO: 7987 - DNA, 164 bp, Artificial Sequence; identical to SEQ ID NO: 7986
  Synthetic polynucleotide

SEQ ID NO: 7988 - DNA, 191 bp, Artificial Sequence
  Synthetic polynucleotide
atcatctcaccttgcctcctgacagcagaacctttcatcctgcaggaaacataatgaggttgcagaaaacataatgaggttgctcgaaacataatgaggttgcgacaaacataatgaggttgcctaaaacataatgaggttgcactaaacataatgaggttgctgcggcgcgccatgcttcatcagactct

SEQ ID NO: 7989 - DNA, 191 bp, Artificial Sequence; identical to SEQ ID NO: 7988
  Synthetic polynucleotide

SEQ ID NO: 7990 - DNA, 197 bp, Artificial Sequence
  Synthetic polynucleotide
atcatctcaccttgcctcctgagtacaaccttagctgacctgcaggagccacacccaggcaagaagccacacccaggcatcgagccacacccaggcagacagccacacccaggcactaagccacacccaggcaactagccacacccaggcatgcagccacacccaggcagtaggcgcgccatgcttcatcagactct

SEQ ID NO: 7991 - DNA, 197 bp, Artificial Sequence; identical to SEQ ID NO: 7990
  Synthetic polynucleotide

SEQ ID NO: 7992 - DNA, 172 bp, Artificial Sequence
  Synthetic polynucleotide
atcatctcaccttgcctcctgcacccgctgtattggaccctgcaggaacaggaagtagaaacaggaagttcgaacaggaagtgacaacaggaagtctaaacaggaagtactaacaggaagttgcaacaggaagtgtaaacaggaagtggcgcgccatgcttcatcagactct

SEQ ID NO: 7993 - DNA, 172 bp, Artificial Sequence; identical to SEQ ID NO: 7992
  Synthetic polynucleotide

SEQ ID NO: 7994 - DNA, 197 bp, Artificial Sequence
  Synthetic polynucleotide
atcatctcaccttgcctcctgtgaggatcttgacgtcacctgcaggcttggaaatccccttagacttggaaatcccctttcgcttggaaatccccttgaccttggaaatccccttctacttggaaatccccttactcttggaaatcccctttgccttggaaatccccttgtaggcgcgccatgcttcatcagactct

SEQ ID NO: 7995 - DNA, 197 bp, Artificial Sequence; identical to SEQ ID NO: 7994
  Synthetic polynucleotide

SEQ ID NO: 7996 - DNA, 188 bp, Artificial Sequence
  Synthetic polynucleotide
atcatctcaccttgcctcctggtgtcatctttccgggacctgcaggcatgtcatgtaaagacatgtcatgtaatcgcatgtcatgtaagaccatgtcatgtaactacatgtcatgtaaactcatgtcatgtaatgccatgtcatgtaagtacatgtcatgtaaggcgcgccatgcttcatcagactct

SEQ ID NO: 7997 - DNA, 188 bp, Artificial Sequence; identical to SEQ ID NO: 7996
  Synthetic polynucleotide

SEQ ID NO: 7998 - DNA, 191 bp, Artificial Sequence
  Synthetic polynucleotide
atcatctcaccttgcctcctggcggccaaattccttgtcctgcagggcattctgggaattgtagtttagagcattctgggaattgtagttttcggcattctgggaattgtagtttgacgcattctgggaattgtagtttctagcattctgggaattgtagtttactggcgcgccatgcttcatcagactct

SEQ ID NO: 7999 - DNA, 191 bp, Artificial Sequence; identical to SEQ ID NO: 7998
  Synthetic polynucleotide

SEQ ID NO: 8000 - DNA, 172 bp, Artificial Sequence
  Synthetic polynucleotide
atcatctcaccttgcctcctgcaaatctcgagccacgacctgcaggtaacgtccgcagataacgtccgctcgtaacgtccgcgactaacgtccgcctataacgtccgcacttaacgtccgctgctaacgtccgcgtataacgtccgcggcgcgccatgcttcatcagactct

SEQ ID NO: 8001 - DNA, 172 bp, Artificial Sequence; identical to SEQ ID NO: 8000
  Synthetic polynucleotide

SEQ ID NO: 8002 - DNA, 164 bp, Artificial Sequence
  Synthetic polynucleotide
atcatctcaccttgcctcctgtaccataggccgggtctcctgcaggaacccggccagaaacccggcctcgaacccggccgacaacccggccctaaacccggccactaacccggcctgcaacccggccgtaaacccggccggcgcgccatgcttcatcagactct

SEQ ID NO: 8003 - DNA, 164 bp, Artificial Sequence; identical to SEQ ID NO: 8002
  Synthetic polynucleotide

SEQ ID NO: 8004 - DNA, 148 bp, Artificial Sequence
  Synthetic polynucleotide
atcatctcaccttgcctcctgctcctagtctcatggatcctgcaggccggaagagaccggaagtcgccggaaggacccggaagctaccggaagactccggaagtgcccggaaggtaccggaagggcgcgccatgcttcatcagactct

SEQ ID NO: 8005 - DNA, 148 bp, Artificial Sequence; identical to SEQ ID NO: 8004
  Synthetic polynucleotide

SEQ ID NO: 8006 - DNA, 191 bp, Artificial Sequence
  Synthetic polynucleotide
atcatctcaccttgcctcctgttcctctcgaaattgtacctgcaggcgaattaattaaatactagacgaattaattaaatacttcgcgaattaattaaatactgaccgaattaattaaatactctacgaattaattaaatactactcgaattaattaaatacttgcggcgcgccatgcttcatcagactct

SEQ ID NO: 8007 - DNA, 191 bp, Artificial Sequence; identical to SEQ ID NO: 8006
  Synthetic polynucleotide

SEQ ID NO: 8008 - DNA, 164 bp, Artificial Sequence
  Synthetic polynucleotide
atcatctcaccttgcctcctgatgtgagtaaagcttcacctgcaggccgcacgcaagaccgcacgcatcgccgcacgcagacccgcacgcactaccgcacgcaactccgcacgcatgcccgcacgcagtaccgcacgcaggcgcgccatgcttcatcagactct

SEQ ID NO: 8009 - DNA, 164 bp, Artificial Sequence; identical to SEQ ID NO: 8008
  Synthetic polynucleotide

SEQ ID NO: 8010 - DNA, 200 bp, Artificial Sequence
  Synthetic polynucleotide
atcatctcaccttgcctcctgtcgttccactactgacccctgcaggccaggtcaccctgaccttgagaccaggtcaccctgaccttgtcgccaggtcaccctgaccttggacccaggtcaccctgaccttgctaccaggtcaccctgaccttgactccaggtcaccctgaccttgggcgcgccatgcttcatcagactct

SEQ ID NO: 8011 - DNA, 200 bp, Artificial Sequence; identical to SEQ ID NO: 8010
  Synthetic polynucleotide

SEQ ID NO: 8012 - DNA, 197 bp, Artificial Sequence
  Synthetic polynucleotide
atcatctcaccttgcctcctggagtctttcacaaccgacctgcagggggaggagggagaggagagggaggagggagaggtcggggaggagggagagggacgggaggagggagaggctagggaggagggagaggactgggaggagggagaggtgcgggaggagggagagggtaggcgcgccatgcttcatcagactct

SEQ ID NO: 8013 - DNA, 197 bp, Artificial Sequence; identical to SEQ ID NO: 8012
  Synthetic polynucleotide

SEQ ID NO: 8014 - DNA, 191 bp, Artificial Sequence
  Synthetic polynucleotide
atcatctcaccttgcctcctgttggttcccgttaaagacctgcaggcataaccacttaacaacagacataaccacttaacaactcgcataaccacttaacaacgaccataaccacttaacaacctacataaccacttaacaacactcataaccacttaacaactgcggcgcgccatgcttcatcagactct

SEQ ID NO: 8015 - DNA, 191 bp, Artificial Sequence; identical to SEQ ID NO: 8014
  Synthetic polynucleotide

SEQ ID NO: 8016 - DNA, 180 bp, Artificial Sequence
  Synthetic polynucleotide
atcatctcaccttgcctcctgaagcagaagcggaagggcctgcaggaggtgtgaagaagaaggtgtgaagatcgaggtgtgaagagacaggtgtgaagactaaggtgtgaagaactaggtgtgaagatgcaggtgtgaagagtaaggtgtgaagaggcgcgccatgcttcatcagactct

SEQ ID NO: 8017 - DNA, 180 bp, Artificial Sequence; identical to SEQ ID NO: 8016
  Synthetic polynucleotide

SEQ ID NO: 8018 - DNA, 191 bp, Artificial Sequence
  Synthetic polynucleotide
atcatctcaccttgcctcctgaacacgctcgaccctagcctgcagggtccattaattaatggaagagtccattaattaatggatcggtccattaattaatggagacgtccattaattaatggactagtccattaattaatggaactgtccattaattaatggatgcggcgcgccatgcttcatcagactct

SEQ ID NO: 8019 - DNA, 191 bp, Artificial Sequence; identical to SEQ ID NO: 8018
  Synthetic polynucleotide

SEQ ID NO: 8020 - DNA, 172 bp, Artificial Sequence
  Synthetic polynucleotide
atcatctcaccttgcctcctgggtatgacaggttccgacctgcaggtgattggctgagatgattggctgtcgtgattggctggactgattggctgctatgattggctgacttgattggctgtgctgattggctggtatgattggctgggcgcgccatgcttcatcagactct

SEQ ID NO: 8021 - DNA, 172 bp, Artificial Sequence; identical to SEQ ID NO: 8020
  Synthetic polynucleotide

SEQ ID NO: 8022 - DNA, 188 bp, Artificial Sequence
  Synthetic polynucleotide
atcatctcaccttgcctcctgcttgcaactctactggccctgcagggcgaccacactgagagcgaccacactgtcggcgaccacactggacgcgaccacactgctagcgaccacactgactgcgaccacactgtgcgcgaccacactggtagcgaccacactgggcgcgccatgcttcatcagactct

SEQ ID NO: 8023 - DNA, 188 bp, Artificial Sequence; identical to SEQ ID NO: 8022
  Synthetic polynucleotide

SEQ ID NO: 8024 - DNA, 188 bp, Artificial Sequence
  Synthetic polynucleotide
atcatctcaccttgcctcctggctcggattaagcgcttcctgcaggcagtgacaggtcagacagtgacaggtctcgcagtgacaggtcgaccagtgacaggtcctacagtgacaggtcactcagtgacaggtctgccagtgacaggtcgtacagtgacaggtcggcgcgccatgcttcatcagactct

SEQ ID NO: 8025 - DNA, 188 bp, Artificial Sequence; identical to SEQ ID NO: 8024
  Synthetic polynucleotide

SEQ ID NO: 8026 - DNA, 191 bp, Artificial Sequence
  Synthetic polynucleotide
atcatctcaccttgcctcctgcaccttatcaaagtacacctgcaggtaagagataacttagatagataagagataacttagattcgtaagagataacttagatgactaagagataacttagatctataagagataacttagatacttaagagataacttagattgcggcgcgccatgcttcatcagactct

SEQ ID NO: 8027 - DNA, 191 bp, Artificial Sequence; identical to SEQ ID NO: 8026
  Synthetic polynucleotide

SEQ ID NO: 8028 - DNA, 179 bp, Artificial Sequence
  Synthetic polynucleotide
atcatctcaccttgcctcctgaaggcggtccaaagcaccctgcaggtgactgacagccacgctggccaatagatgactgacagccacgctggccaattcgtgactgacagccacgctggccaatgactgactgacagccacgctggccaatctaggcgcgccatgcttcatcagactct

SEQ ID NO: 8029 - DNA, 179 bp, Artificial Sequence; identical to SEQ ID NO: 8028
  Synthetic polynucleotide

SEQ ID NO: 8030 - DNA, 156 bp, Artificial Sequence
  Synthetic polynucleotide
atcatctcaccttgcctcctgacgattgaccattagttcctgcaggtatacataagatatacatatcgtatacatagactatacatactatatacataacttatacatatgctatacatagtatatacataggcgcgccatgcttcatcagactct

SEQ ID NO: 8031 - DNA, 156 bp, Artificial Sequence; identical to SEQ ID NO: 8030
  Synthetic polynucleotide

SEQ ID NO: 8032 - DNA, 156 bp, Artificial Sequence
  Synthetic polynucleotide
atcatctcaccttgcctcctgcttgatcttcacgttcacctgcaggatttcctgagaatttcctgtcgatttcctggacatttcctgctaatttcctgactatttcctgtgcatttcctggtaatttcctgggcgcgccatgcttcatcagactct

SEQ ID NO: 8033 - DNA, 156 bp, Artificial Sequence; identical to SEQ ID NO: 8032
  Synthetic polynucleotide

SEQ ID NO: 8034 - DNA, 190 bp, Artificial Sequence
  Synthetic polynucleotide
atcatctcaccttgcctcctgagtattgtggccgagtgcctgcaggcagggtcagagcggagacagggtcagagcggtcgcagggtcagagcgggaccagggtcagagcggctacagggtcagagcggactcagggtcagagcggtgccagggtcagagcgggtaggcgcgccatgcttcatcagactct

SEQ ID NO: 8035 - DNA, 190 bp, Artificial Sequence; identical to SEQ ID NO: 8034
  Synthetic polynucleotide

SEQ ID NO: 8036 - DNA, 197 bp, Artificial Sequence
  Synthetic polynucleotide
atcatctcaccttgcctcctgtaatagcaatcagcgtgcctgcaggtagcaggaagtgactagatagcaggaagtgacttcgtagcaggaagtgactgactagcaggaagtgactctatagcaggaagtgactacttagcaggaagtgacttgctagcaggaagtgactgtaggcgcgccatgcttcatcagactct

SEQ ID NO: 8037 - DNA, 197 bp, Artificial Sequence; identical to SEQ ID NO: 8036
  Synthetic polynucleotide

SEQ ID NO: 8038 - DNA, 197 bp, Artificial Sequence
  Synthetic polynucleotide
atcatctcaccttgcctcctgtggtagggataccgctgcctgcagggggtcacggtgacctagagggtcacggtgaccttcggggtcacggtgacctgacgggtcacggtgacctctagggtcacggtgacctactgggtcacggtgaccttgcgggtcacggtgacctgtaggcgcgccatgcttcatcagactct

SEQ ID NO: 8039 - DNA, 197 bp, Artificial Sequence; identical to SEQ ID NO: 8038
  Synthetic polynucleotide

SEQ ID NO: 8040 - DNA, 191 bp, Artificial Sequence
  Synthetic polynucleotide
atcatctcaccttgcctcctgacggaaacgtacagtaccctgcaggaaggtcaacagaggtcaagaaaggtcaacagaggtcatcgaaggtcaacagaggtcagacaaggtcaacagaggtcactaaaggtcaacagaggtcaactaaggtcaacagaggtcatgcggcgcgccatgcttcatcagactct

SEQ ID NO: 8041 - DNA, 191 bp, Artificial Sequence; identical to SEQ ID NO: 8040
  Synthetic polynucleotide

SEQ ID NO: 8042 - DNA, 156 bp, Artificial Sequence
  Synthetic polynucleotide
atcatctcaccttgcctcctgtgtaaattcttcccactcctgcaggtgagtcatagatgagtcattcgtgagtcatgactgagtcatctatgagtcatacttgagtcattgctgagtcatgtatgagtcatggcgcgccatgcttcatcagactct

SEQ ID NO: 8043 - DNA, 156 bp, Artificial Sequence; identical to SEQ ID NO: 8042
  Synthetic polynucleotide

SEQ ID NO: 8044 - DNA, 196 bp, Artificial Sequence
  Synthetic polynucleotide
atcatctcaccttgcctcctgtgcgatatcgcccacgtcctgcaggtcagccaatcagaagggggggtagatcagccaatcagaagggggggttcgtcagccaatcagaagggggggtgactcagccaatcagaagggggggtctatcagccaatcagaagggggggtactggcgcgccatgcttcatcagactct

SEQ ID NO: 8045 - DNA, 196 bp, Artificial Sequence; identical to SEQ ID NO: 8044
  Synthetic polynucleotide

SEQ ID NO: 8046 - DNA, 164 bp, Artificial Sequence
  Synthetic polynucleotide
atcatctcaccttgcctcctgaaagccataaagctttccctgcaggtcagctgttagatcagctgtttcgtcagctgttgactcagctgttctatcagctgttacttcagctgtttgctcagctgttgtatcagctgttggcgcgccatgcttcatcagactct

SEQ ID NO: 8047 - DNA, 164 bp, Artificial Sequence; identical to SEQ ID NO: 8046
  Synthetic polynucleotide

SEQ ID NO: 8048 - DNA, 185 bp, Artificial Sequence
  Synthetic polynucleotide
atcatctcaccttgcctcctgaacacttatgcattctccctgcaggggaggtcattaattatagaggaggtcattaattattcgggaggtcattaattatgacggaggtcattaattatctaggaggtcattaattatactggaggtcattaattattgcggcgcgccatgcttcatcagactct

SEQ ID NO: 8049 - DNA, 185 bp, Artificial Sequence; identical to SEQ ID NO: 8048
  Synthetic polynucleotide

SEQ ID NO: 8050 - DNA, 180 bp, Artificial Sequence
  Synthetic polynucleotide
atcatctcaccttgcctcctgcagcgaatcctatcccgcctgcaggagtgactaagtagaagtgactaagttcgagtgactaagtgacagtgactaagtctaagtgactaagtactagtgactaagttgcagtgactaagtgtaagtgactaagtggcgcgccatgcttcatcagactct

SEQ ID NO: 8051 - DNA, 180 bp, Artificial Sequence; identical to SEQ ID NO: 8050
  Synthetic polynucleotide

SEQ ID NO: 8052 - DNA, 196 bp, Artificial Sequence
  Synthetic polynucleotide
atcatctcaccttgcctcctgcggagcgtaatggaagacctgcaggttcatttgcatatagattcatttgcatattcgttcatttgcatatgacttcatttgcatatctattcatttgcatatactttcatttgcatattgcttcatttgcatatgtattcatttgcatatggcgcgccatgcttcatcagactct

SEQ ID NO: 8053 - DNA, 196 bp, Artificial Sequence; identical to SEQ ID NO: 8052
  Synthetic polynucleotide

SEQ ID NO: 8054 - DNA, 148 bp, Artificial Sequence
  Synthetic polynucleotide
atcatctcaccttgcctcctggccactccaacacttaacctgcaggctaattaagactaattatcgctaattagacctaattactactaattaactctaattatgcctaattagtactaattaggcgcgccatgcttcatcagactct

SEQ ID NO: 8055 - DNA, 148 bp, Artificial Sequence; identical to SEQ ID NO: 8054
  Synthetic polynucleotide

SEQ ID NO: 8056 - DNA, 148 bp, Artificial Sequence
  Synthetic polynucleotide
atcatctcaccttgcctcctgctcaatggcgatcatcgcctgcaggctaattgagactaattgtcgctaattggacctaattgctactaattgactctaattgtgcctaattggtactaattgggcgcgccatgcttcatcagactct

SEQ ID NO: 8057 - DNA, 148 bp, Artificial Sequence; identical to SEQ ID NO: 8056
  Synthetic polynucleotide

SEQ ID NO: 8058 - DNA, 180 bp, Artificial Sequence
  Synthetic polynucleotide
atcatctcaccttgcctcctgacacttgttgagtatagcctgcaggtccctaataaaagatccctaataaatcgtccctaataaagactccctaataaactatccctaataaaacttccctaataaatgctccctaataaagtatccctaataaaggcgcgccatgcttcatcagactct

SEQ ID NO: 8059 - DNA, 180 bp, Artificial Sequence; identical to SEQ ID NO: 8058
  Synthetic polynucleotide

SEQ ID NO: 8060 - DNA, 188 bp, Artificial Sequence
  Synthetic polynucleotide
atcatctcaccttgcctcctgttaaacgcgtgttgccccctgcaggattgtaaacaaaagaattgtaaacaaatcgattgtaaacaaagacattgtaaacaaactaattgtaaacaaaactattgtaaacaaatgcattgtaaacaaagtaattgtaaacaaaggcgcgccatgcttcatcagactct

SEQ ID NO: 8061 - DNA, 188 bp, Artificial Sequence; identical to SEQ ID NO: 8060
  Synthetic polynucleotide

SEQ ID NO: 8062 - DNA, 188 bp, Artificial Sequence
  Synthetic polynucleotide
atcatctcaccttgcctcctgctatctagtatggcttacctgcaggcagcggggggtcagacagcggggggtctcgcagcggggggtcgaccagcggggggtcctacagcggggggtcactcagcggggggtctgccagcggggggtcgtacagcggggggtcggcgcgccatgcttcatcagactct

SEQ ID NO: 8063 - DNA, 188 bp, Artificial Sequence; identical to SEQ ID NO: 8062
  Synthetic polynucleotide

SEQ ID NO: 8064 - DNA, 172 bp, Artificial Sequence
  Synthetic polynucleotide
atcatctcaccttgcctcctggcgacgctcccagtttacctgcaggaccaattaagagaaccaattaagtcgaccaattaaggacaccaattaagctaaccaattaagactaccaattaagtgcaccaattaaggtaaccaattaagggcgcgccatgcttcatcagactct

SEQ ID NO: 8065 - DNA, 172 bp, Artificial Sequence; identical to SEQ ID NO: 8064
  Synthetic polynucleotide

SEQ ID NO: 8066 - DNA, 190 bp, Artificial Sequence
  Synthetic polynucleotide
atcatctcaccttgcctcctggaagtcctactggtaatcctgcaggaaaaatattattatagaaaaaatattattattcgaaaaatattattatgacaaaaatattattatctaaaaaatattattatactaaaaatattattattgcaaaaatattattatgtaggcgcgccatgcttcatcagactct

SEQ ID NO: 8067 - DNA, 190 bp, Artificial Sequence; identical to SEQ ID NO: 8066
  Synthetic polynucleotide

SEQ ID NO: 8068 - DNA, 172 bp, Artificial Sequence
  Synthetic polynucleotide
atcatctcaccttgcctcctgggcgcgtctaagtagaacctgcaggaccaattaaaagaaccaattaaatcgaccaattaaagacaccaattaaactaaccaattaaaactaccaattaaatgcaccaattaaagtaaccaattaaaggcgcgccatgcttcatcagactct

SEQ ID NO: 8069 - DNA, 172 bp, Artificial Sequence; identical to SEQ ID NO: 8068
  Synthetic polynucleotide

SEQ ID NO: 8070 - DNA, 180 bp, Artificial Sequence
  Synthetic polynucleotide
atcatctcaccttgcctcctggctaaactagccggaagcctgcaggaatttgcatatagaaatttgcatattcgaatttgcatatgacaatttgcatatctaaatttgcatatactaatttgcatattgcaatttgcatatgtaaatttgcatatggcgcgccatgcttcatcagactct

SEQ ID NO: 8071 - DNA, 180 bp, Artificial Sequence; identical to SEQ ID NO: 8070
  Synthetic polynucleotide

SEQ ID NO: 8072 - DNA, 172 bp, Artificial Sequence
  Synthetic polynucleotide
atcatctcaccttgcctcctgcgcgttacacagacgtccctgcaggaccaattaacagaaccaattaactcgaccaattaacgacaccaattaacctaaccaattaacactaccaattaactgcaccaattaacgtaaccaattaacggcgcgccatgcttcatcagactct

SEQ ID NO: 8073 - DNA, 172 bp, Artificial Sequence; identical to SEQ ID NO: 8072
  Synthetic polynucleotide

SEQ ID NO: 8074 - DNA, 172 bp, Artificial Sequence
  Synthetic polynucleotide
atcatctcaccttgcctcctgtaatgcatcaggtttgacctgcaggccagtcatttagaccagtcattttcgccagtcatttgacccagtcatttctaccagtcatttactccagtcattttgcccagtcatttgtaccagtcatttggcgcgccatgcttcatcagactct

SEQ ID NO: 8075 - DNA, 172 bp, Artificial Sequence; identical to SEQ ID NO: 8074
  Synthetic polynucleotide

SEQ ID NO: 8076 - DNA, 156 bp, Artificial Sequence
  Synthetic polynucleotide
atcatctcaccttgcctcctggacctaatccggacccacctgcaggaatgtatcagaaatgtatctcgaatgtatcgacaatgtatcctaaatgtatcactaatgtatctgcaatgtatcgtaaatgtatcggcgcgccatgcttcatcagactct

SEQ ID NO: 8077 - DNA, 156 bp, Artificial Sequence; identical to SEQ ID NO: 8076
  Synthetic polynucleotide

SEQ ID NO: 8078 - DNA, 172 bp, Artificial Sequence
  Synthetic polynucleotide
atcatctcaccttgcctcctgcagcctggcttggtgttcctgcaggtgacgtcaccagatgacgtcacctcgtgacgtcaccgactgacgtcaccctatgacgtcaccacttgacgtcacctgctgacgtcaccgtatgacgtcaccggcgcgccatgcttcatcagactct

SEQ ID NO: 8079 - DNA, 172 bp, Artificial Sequence; identical to SEQ ID NO: 8078
  Synthetic polynucleotide

SEQ ID NO: 8080 - DNA, 156 bp, Artificial Sequence
  Synthetic polynucleotide
atcatctcaccttgcctcctgctaagcgggttaatgcacctgcaggagagttcaagaagagttcatcgagagttcagacagagttcactaagagttcaactagagttcatgcagagttcagtaagagttcaggcgcgccatgcttcatcagactct

SEQ ID NO: 8081 - DNA, 156 bp, Artificial Sequence; identical to SEQ ID NO: 8080
  Synthetic polynucleotide

SEQ ID NO: 8082 - DNA, 164 bp, Artificial Sequence
  Synthetic polynucleotide
atcatctcaccttgcctcctgatcttgatataccacggcctgcaggtgaccgttaagatgaccgttatcgtgaccgttagactgaccgttactatgaccgttaacttgaccgttatgctgaccgttagtatgaccgttaggcgcgccatgcttcatcagactct

SEQ ID NO: 8083 - DNA, 164 bp, Artificial Sequence; identical to SEQ ID NO: 8082
  Synthetic polynucleotide

SEQ ID NO: 8084 - DNA, 197 bp, Artificial Sequence
  Synthetic polynucleotide
atcatctcaccttgcctcctgaagatacatacgcggatcctgcagggactaagcaaacaatgaaagagactaagcaaacaatgaatcggactaagcaaacaatgaagacgactaagcaaacaatgaactagactaagcaaacaatgaaactgactaagcaaacaatgaatgcggcgcgccatgcttcatcagactct

SEQ ID NO: 8085 - DNA, 197 bp, Artificial Sequence; identical to SEQ ID NO: 8084
  Synthetic polynucleotide

SEQ ID NO: 8086 - DNA, 191 bp, Artificial Sequence
  Synthetic polynucleotide
atcatctcaccttgcctcctgattaccttcacacgcatcctgcaggggactacaactcccagcaggcagaggactacaactcccagcaggctcgggactacaactcccagcaggcgacggactacaactcccagcaggcctaggactacaactcccagcaggcactggcgcgccatgcttcatcagactct

SEQ ID NO: 8087 - DNA, 191 bp, Artificial Sequence; identical to SEQ ID NO: 8086
  Synthetic polynucleotide

SEQ ID NO: 8088 - DNA, 196 bp, Artificial Sequence
  Synthetic polynucleotide
atcatctcaccttgcctcctgcttattcattcaaccgacctgcaggaagtaaataaacaagaaagtaaataaacatcgaagtaaataaacagacaagtaaataaacactaaagtaaataaacaactaagtaaataaacatgcaagtaaataaacagtaaagtaaataaacaggcgcgccatgcttcatcagactct

SEQ ID NO: 8089 - DNA, 196 bp, Artificial Sequence; identical to SEQ ID NO: 8088
  Synthetic polynucleotide

SEQ ID NO: 8090 - DNA, 180 bp, Artificial Sequence
  Synthetic polynucleotide
atcatctcaccttgcctcctgcaccttaaatctcgtgtcctgcaggtccttatctgcagatccttatctgctcgtccttatctgcgactccttatctgcctatccttatctgcacttccttatctgctgctccttatctgcgtatccttatctgcggcgcgccatgcttcatcagactct

SEQ ID NO: 8091 - DNA, 180 bp, Artificial Sequence; identical to SEQ ID NO: 8090
  Synthetic polynucleotide

SEQ ID NO: 8092 - DNA, 156 bp, Artificial Sequence
  Synthetic polynucleotide
atcatctcaccttgcctcctgtgccacaattggtccttcctgcaggtttcgcgcagatttcgcgctcgtttcgcgcgactttcgcgcctatttcgcgcacttttcgcgctgctttcgcgcgtatttcgcgcggcgcgccatgcttcatcagactct

SEQ ID NO: 8093 - DNA, 156 bp, Artificial Sequence; identical to SEQ ID NO: 8092
  Synthetic polynucleotide

SEQ ID NO: 8094 - DNA, 164 bp, Artificial Sequence
  Synthetic polynucleotide
atcatctcaccttgcctcctgccaatgtcgggtgatcccctgcaggagcaaacagagaagcaaacagtcgagcaaacaggacagcaaacagctaagcaaacagactagcaaacagtgcagcaaacaggtaagcaaacagggcgcgccatgcttcatcagactct

SEQ ID NO: 8095 - DNA, 164 bp, Artificial Sequence; identical to SEQ ID NO: 8094
  Synthetic polynucleotide

SEQ ID NO: 8096 - DNA, 190 bp, Artificial Sequence
  Synthetic polynucleotide
atcatctcaccttgcctcctgggcttcttctcatctcgcctgcaggccccgctgcccggcagaccccgctgcccggctcgccccgctgcccggcgacccccgctgcccggcctaccccgctgcccggcactccccgctgcccggctgcccccgctgcccggcgtaggcgcgccatgcttcatcagactct

SEQ ID NO: 8097 - DNA, 190 bp, Artificial Sequence; identical to SEQ ID NO: 8096
  Synthetic polynucleotide

SEQ ID NO: 8098 - DNA, 172 bp, Artificial Sequence
  Synthetic polynucleotide
atcatctcaccttgcctcctggtaaacttccgtagactcctgcagggcgcgcgcgcagagcgcgcgcgctcggcgcgcgcgcgacgcgcgcgcgcctagcgcgcgcgcactgcgcgcgcgctgcgcgcgcgcgcgtagcgcgcgcgcggcgcgccatgcttcatcagactct

SEQ ID NO: 8099 - DNA, 172 bp, Artificial Sequence; identical to SEQ ID NO: 8098
  Synthetic polynucleotide

SEQ ID NO: 8100 - DNA, 196 bp, Artificial Sequence
  Synthetic polynucleotide
atcatctcaccttgcctcctggctttgatcgatccgatcctgcaggtaaacaaacacatagataaacaaacacattcgtaaacaaacacatgactaaacaaacacatctataaacaaacacatacttaaacaaacacattgctaaacaaacacatgtataaacaaacacatggcgcgccatgcttcatcagactct

SEQ ID NO: 8101 - DNA, 196 bp, Artificial Sequence; identical to SEQ ID NO: 8100
  Synthetic polynucleotide

SEQ ID NO: 8102 - DNA, 196 bp, Artificial Sequence
  Synthetic polynucleotide
atcatctcaccttgcctcctggatagagactagactagcctgcaggaagcgcgcccccgagaaagcgcgcccccgtcgaagcgcgcccccggacaagcgcgcccccgctaaagcgcgcccccgactaagcgcgcccccgtgcaagcgcgcccccggtaaagcgcgcccccgggcgcgccatgcttcatcagactct

SEQ ID NO: 8103 - DNA, 196 bp, Artificial Sequence; identical to SEQ ID NO: 8102
  Synthetic polynucleotide

SEQ ID NO: 8104 - DNA, 196 bp, Artificial Sequence
  Synthetic polynucleotide
atcatctcaccttgcctcctgtttggtgccctcgtgttcctgcaggtaaacaaacatccagataaacaaacatcctcgtaaacaaacatccgactaaacaaacatccctataaacaaacatccacttaaacaaacatcctgctaaacaaacatccgtataaacaaacatccggcgcgccatgcttcatcagactct

SEQ ID NO: 8105 - DNA, 196 bp, Artificial Sequence; identical to SEQ ID NO: 8104
  Synthetic polynucleotide

SEQ ID NO: 8106 - DNA, 180 bp, Artificial Sequence
  Synthetic polynucleotide
atcatctcaccttgcctcctgggcggtcaaatgccgatcctgcaggcgccccctggtagacgccccctggttcgcgccccctggtgaccgccccctggtctacgccccctggtactcgccccctggttgccgccccctggtgtacgccccctggtggcgcgccatgcttcatcagactct

SEQ ID NO: 8107 - DNA, 180 bp, Artificial Sequence; identical to SEQ ID NO: 8106
  Synthetic polynucleotide

SEQ ID NO: 8108 - DNA, 197 bp, Artificial Sequence
  Synthetic polynucleotide
atcatctcaccttgcctcctgcgcttattgctggcaaacctgcagggtgacctttgaccccagagtgacctttgacccctcggtgacctttgaccccgacgtgacctttgaccccctagtgacctttgaccccactgtgacctttgacccctgcgtgacctttgaccccgtaggcgcgccatgcttcatcagactct

SEQ ID NO: 8109 - DNA, 197 bp, Artificial Sequence; identical to SEQ ID NO: 8108
  Synthetic polynucleotide

SEQ ID NO: 8110 - DNA, 188 bp, Artificial Sequence
  Synthetic polynucleotide
atcatctcaccttgcctcctggatgggcttcatctccacctgcaggtgacaggtgtcaagatgacaggtgtcatcgtgacaggtgtcagactgacaggtgtcactatgacaggtgtcaacttgacaggtgtcatgctgacaggtgtcagtatgacaggtgtcaggcgcgccatgcttcatcagactct

SEQ ID NO: 8111 - DNA, 188 bp, Artificial Sequence; identical to SEQ ID NO: 8110
  Synthetic polynucleotide

SEQ ID NO: 8112 - DNA, 156 bp, Artificial Sequence
  Synthetic polynucleotide
atcatctcaccttgcctcctgcatcagatctagatagccctgcaggggcaggtgagaggcaggtgtcgggcaggtggacggcaggtgctaggcaggtgactggcaggtgtgcggcaggtggtaggcaggtgggcgcgccatgcttcatcagactct

SEQ ID NO: 8113 - DNA, 156 bp, Artificial Sequence; identical to SEQ ID NO: 8112
  Synthetic polynucleotide

SEQ ID NO: 8114 - DNA, 186 bp, Artificial Sequence
  Synthetic polynucleotide
atcatctcaccttgcctcctgcatcctaggcgttcagacctgcaggcattcctgagggatgacttaagacattcctgagggatgacttatcgcattcctgagggatgacttagaccattcctgagggatgacttactacattcctgagggatgacttaactggcgcgccatgcttcatcagactct

SEQ ID NO: 8115 - DNA, 186 bp, Artificial Sequence; identical to SEQ ID NO: 8114
  Synthetic polynucleotide

SEQ ID NO: 8116 - DNA, 172 bp, Artificial Sequence
  Synthetic polynucleotide
atcatctcaccttgcctcctgctccactcactcttcagcctgcagggctaaacggtagagctaaacggttcggctaaacggtgacgctaaacggtctagctaaacggtactgctaaacggttgcgctaaacggtgtagctaaacggtggcgcgccatgcttcatcagactct

SEQ ID NO: 8117 - DNA, 172 bp, Artificial Sequence; identical to SEQ ID NO: 8116
  Synthetic polynucleotide

SEQ ID NO: 8118 - DNA, 164 bp, Artificial Sequence
  Synthetic polynucleotide
atcatctcaccttgcctcctgagaggtgtaggattgtacctgcaggagggtatcaagaagggtatcatcgagggtatcagacagggtatcactaagggtatcaactagggtatcatgcagggtatcagtaagggtatcaggcgcgccatgcttcatcagactct

SEQ ID NO: 8119 - DNA, 164 bp, Artificial Sequence; identical to SEQ ID NO: 8118
  Synthetic polynucleotide

SEQ ID NO: 8120 - DNA, 197 bp, Artificial Sequence
  Synthetic polynucleotide
atcatctcaccttgcctcctgcctgtttgataggcctccctgcaggtatatcgattattttagatatatcgattatttttcgtatatcgattattttgactatatcgattattttctatatatcgattattttacttatatcgattatttttgctatatcgattattttgtaggcgcgccatgcttcatcagactct

SEQ ID NO: 8121 - DNA, 197 bp, Artificial Sequence; identical to SEQ ID NO: 8120
  Synthetic polynucleotide

SEQ ID NO: 8122 - DNA, 188 bp, Artificial Sequence
  Synthetic polynucleotide
atcatctcaccttgcctcctggccacactgccctttaacctgcaggaccatatatggcagaaccatatatggctcgaccatatatggcgacaccatatatggcctaaccatatatggcactaccatatatggctgcaccatatatggcgtaaccatatatggcggcgcgccatgcttcatcagactct

SEQ ID NO: 8123 - DNA, 188 bp, Artificial Sequence; identical to SEQ ID NO: 8122
  Synthetic polynucleotide

SEQ ID NO: 8124 - DNA, 156 bp, Artificial Sequence
  Synthetic polynucleotide
atcatctcaccttgcctcctggcaacaagaccttcttgcctgcaggttgatgtgagattgatgtgtcgttgatgtggacttgatgtgctattgatgtgactttgatgtgtgcttgatgtggtattgatgtgggcgcgccatgcttcatcagactct

SEQ ID NO: 8125 - DNA, 156 bp, Artificial Sequence; identical to SEQ ID NO: 8124
  Synthetic polynucleotide

SEQ ID NO: 8126 - DNA, 172 bp, Artificial Sequence
  Synthetic polynucleotide
atcatctcaccttgcctcctgcacatgaacgctaacgccctgcaggctaattaattagactaattaatttcgctaattaattgacctaattaattctactaattaattactctaattaatttgcctaattaattgtactaattaattggcgcgccatgcttcatcagactct

SEQ ID NO: 8127 - DNA, 172 bp, Artificial Sequence; identical to SEQ ID NO: 8126
  Synthetic polynucleotide

SEQ ID NO: 8128 - DNA, 188 bp, Artificial Sequence
  Synthetic polynucleotide
atcatctcaccttgcctcctgtattaacggtcctttgacctgcagggcggctgagcggagagcggctgagcggtcggcggctgagcgggacgcggctgagcggctagcggctgagcggactgcggctgagcggtgcgcggctgagcgggtagcggctgagcggggcgcgccatgcttcatcagactct

SEQ ID NO: 8129 - DNA, 188 bp, Artificial Sequence; identical to SEQ ID NO: 8128
  Synthetic polynucleotide

SEQ ID NO: 8130 - DNA, 191 bp, Artificial Sequence
  Synthetic polynucleotide
atcatctcaccttgcctcctgatacaccgccgtatttacctgcaggcaatctatttttagcatagacaatctatttttagcattcgcaatctatttttagcatgaccaatctatttttagcatctacaatctatttttagcatactcaatctatttttagcattgcggcgcgccatgcttcatcagactct

SEQ ID NO: 8131 - DNA, 191 bp, Artificial Sequence; identical to SEQ ID NO: 8130
  Synthetic polynucleotide

SEQ ID NO: 8132 - DNA, 191 bp, Artificial Sequence
  Synthetic polynucleotide
atcatctcaccttgcctcctgtcgtagctacgaagcgacctgcaggtcgcaaggcatgatgggaaatagatcgcaaggcatgatgggaaattcgtcgcaaggcatgatgggaaatgactcgcaaggcatgatgggaaatctatcgcaaggcatgatgggaaatactggcgcgccatgcttcatcagactct

SEQ ID NO: 8133 - DNA, 191 bp, Artificial Sequence; identical to SEQ ID NO: 8132
  Synthetic polynucleotide

SEQ ID NO: 8134 - DNA, 188 bp, Artificial Sequence
  Synthetic polynucleotide
atcatctcaccttgcctcctggttggagacaacagaggcctgcaggcaggaagtggttagacaggaagtggtttcgcaggaagtggttgaccaggaagtggttctacaggaagtggttactcaggaagtggtttgccaggaagtggttgtacaggaagtggttggcgcgccatgcttcatcagactct

SEQ ID NO: 8135 - DNA, 188 bp, Artificial Sequence; identical to SEQ ID NO: 8134
  Synthetic polynucleotide

SEQ ID NO: 8136 - DNA, 196 bp, Artificial Sequence
  Synthetic polynucleotide
atcatctcaccttgcctcctgtaacgggaacaacgtttcctgcaggctaagtaaacaagagactaagtaaacaagtcgctaagtaaacaaggacctaagtaaacaagctactaagtaaacaagactctaagtaaacaagtgcctaagtaaacaaggtactaagtaaacaagggcgcgccatgcttcatcagactct

SEQ ID NO: 8137 - DNA, 196 bp, Artificial Sequence; identical to SEQ ID NO: 8136
  Synthetic polynucleotide

SEQ ID NO: 8138 - DNA, 172 bp, Artificial Sequence
  Synthetic polynucleotide
atcatctcaccttgcctcctgcaactatatgatgaggtcctgcaggccgtgaccccagaccgtgacccctcgccgtgaccccgacccgtgaccccctaccgtgaccccactccgtgacccctgcccgtgaccccgtaccgtgaccccggcgcgccatgcttcatcagactct

SEQ ID NO: 8139 - DNA, 172 bp, Artificial Sequence; identical to SEQ ID NO: 8138
  Synthetic polynucleotide

SEQ ID NO: 8140 - DNA, 188 bp, Artificial Sequence
  Synthetic polynucleotide
atcatctcaccttgcctcctgcccacgtcatcgagcaacctgcagggttcaaggtcagagagttcaaggtcagtcggttcaaggtcaggacgttcaaggtcagctagttcaaggtcagactgttcaaggtcagtgcgttcaaggtcaggtagttcaaggtcagggcgcgccatgcttcatcagactct

SEQ ID NO: 8141 - DNA, 188 bp, Artificial Sequence; identical to SEQ ID NO: 8140
  Synthetic polynucleotide

SEQ ID NO: 8142 - DNA, 172 bp, Artificial Sequence
  Synthetic polynucleotide
atcatctcaccttgcctcctgacaccaccgttgcctaccctgcaggtgtgacctcaagatgtgacctcatcgtgtgacctcagactgtgacctcactatgtgacctcaacttgtgacctcatgctgtgacctcagtatgtgacctcaggcgcgccatgcttcatcagactct

SEQ ID NO: 8143 - DNA, 172 bp, Artificial Sequence; identical to SEQ ID NO: 8142
  Synthetic polynucleotide

SEQ ID NO: 8144 - DNA, 198 bp, Artificial Sequence
  Synthetic polynucleotide
atcatctcaccttgcctcctgtctctccagaggctatccctgcaggaagtaggtcaccgtgacctacttagaaagtaggtcaccgtgacctactttcgaagtaggtcaccgtgacctacttgacaagtaggtcaccgtgacctacttctaaagtaggtcaccgtgacctacttggcgcgccatgcttcatcagactct

SEQ ID NO: 8145 - DNA, 198 bp, Artificial Sequence; identical to SEQ ID NO: 8144
  Synthetic polynucleotide

SEQ ID NO: 8146 - DNA, 197 bp, Artificial Sequence
  Synthetic polynucleotide
atcatctcaccttgcctcctgcagccaatcagctcattcctgcagggacatgtccagacatgtcagagacatgtccagacatgtctcggacatgtccagacatgtcgacgacatgtccagacatgtcctagacatgtccagacatgtcactgacatgtccagacatgtctgcggcgcgccatgcttcatcagactct

SEQ ID NO: 8147 - DNA, 197 bp, Artificial Sequence; identical to SEQ ID NO: 8146
  Synthetic polynucleotide

SEQ ID NO: 8148 - DNA, 180 bp, Artificial Sequence
  Synthetic polynucleotide
atcatctcaccttgcctcctgactatcgaacaagtgcgcctgcaggtacatccgggtagatacatccgggttcgtacatccgggtgactacatccgggtctatacatccgggtacttacatccgggttgctacatccgggtgtatacatccgggtggcgcgccatgcttcatcagactct

SEQ ID NO: 8149 - DNA, 180 bp, Artificial Sequence; identical to SEQ ID NO: 8148
  Synthetic polynucleotide

SEQ ID NO: 8150 - DNA, 172 bp, Artificial Sequence
  Synthetic polynucleotide
atcatctcaccttgcctcctgaatgtcctctttgcgagcctgcagggacaggtgtaagagacaggtgtatcggacaggtgtagacgacaggtgtactagacaggtgtaactgacaggtgtatgcgacaggtgtagtagacaggtgtaggcgcgccatgcttcatcagactct

SEQ ID NO: 8151 - DNA, 172 bp, Artificial Sequence; identical to SEQ ID NO: 8150
  Synthetic polynucleotide

SEQ ID NO: 8152 - DNA, 190 bp, Artificial Sequence
  Synthetic polynucleotide
atcatctcaccttgcctcctggcatggaggcctcttatcctgcaggctgtggggggtcgtagactgtggggggtcgttcgctgtggggggtcgtgacctgtggggggtcgtctactgtggggggtcgtactctgtggggggtcgttgcctgtggggggtcgtgtaggcgcgccatgcttcatcagactct

SEQ ID NO: 8153 - DNA, 190 bp, Artificial Sequence; identical to SEQ ID NO: 8152
  Synthetic polynucleotide

SEQ ID NO: 8154 - DNA, 197 bp, Artificial Sequence
  Synthetic polynucleotide
atcatctcaccttgcctcctggggactcatgagtctaccctgcagggacatgtcccaacatgttagagacatgtcccaacatgtttcggacatgtcccaacatgttgacgacatgtcccaacatgttctagacatgtcccaacatgttactgacatgtcccaacatgtttgcggcgcgccatgcttcatcagactct

SEQ ID NO: 8155 - DNA, 197 bp, Artificial Sequence; identical to SEQ ID NO: 8154
  Synthetic polynucleotide

SEQ ID NO: 8156 - DNA, 185 bp, Artificial Sequence
  Synthetic polynucleotide
atcatctcaccttgcctcctggaaaggaattcctccaacctgcaggaggttaattaactcaaagaaggttaattaactcaatcgaggttaattaactcaagacaggttaattaactcaactaaggttaattaactcaaactaggttaattaactcaatgcggcgcgccatgcttcatcagactct

SEQ ID NO: 8157 - DNA, 185 bp, Artificial Sequence; identical to SEQ ID NO: 8156
  Synthetic polynucleotide

SEQ ID NO: 8158 - DNA, 148 bp, Artificial Sequence
  Synthetic polynucleotide
atcatctcaccttgcctcctgtgcatcggcgaccttagcctgcaggttgacagagattgacagtcgttgacaggacttgacagctattgacagactttgacagtgcttgacaggtattgacagggcgcgccatgcttcatcagactct

SEQ ID NO: 8159 - DNA, 148 bp, Artificial Sequence; identical to SEQ ID NO: 8158
  Synthetic polynucleotide

SEQ ID NO: 8160 - DNA, 191 bp, Artificial Sequence
  Synthetic polynucleotide
atcatctcaccttgcctcctgacggtgcgctcctattacctgcaggcacaattaattaacgcgagacacaattaattaacgcgtcgcacaattaattaacgcggaccacaattaattaacgcgctacacaattaattaacgcgactcacaattaattaacgcgtgcggcgcgccatgcttcatcagactct

SEQ ID NO: 8161 - DNA, 191 bp, Artificial Sequence; identical to SEQ ID NO: 8160
  Synthetic polynucleotide

SEQ ID NO: 8162 - DNA, 185 bp, Artificial Sequence
  Synthetic polynucleotide
atcatctcaccttgcctcctgacgatagtgctaccttgcctgcaggcggtttaaaaataaccagacggtttaaaaataacctcgcggtttaaaaataaccgaccggtttaaaaataaccctacggtttaaaaataaccactcggtttaaaaataacctgcggcgcgccatgcttcatcagactct

SEQ ID NO: 8163 - DNA, 185 bp, Artificial Sequence; identical to SEQ ID NO: 8162
  Synthetic polynucleotide

SEQ ID NO: 8164 - DNA, 190 bp, Artificial Sequence
  Synthetic polynucleotide
atcatctcaccttgcctcctggtcgactgggaacaacacctgcaggcctgcggcaggtggagacctgcggcaggtggtcgcctgcggcaggtgggaccctgcggcaggtggctacctgcggcaggtggactcctgcggcaggtggtgccctgcggcaggtgggtaggcgcgccatgcttcatcagactct

SEQ ID NO: 8165 - DNA, 190 bp, Artificial Sequence; identical to SEQ ID NO: 8164
  Synthetic polynucleotide

SEQ ID NO: 8166 - DNA, 196 bp, Artificial Sequence
  Synthetic polynucleotide
atcatctcaccttgcctcctgcctataggtgtaaagcgcctgcaggacccccccttctgattggctgaagaacccccccttctgattggctgatcgacccccccttctgattggctgagacacccccccttctgattggctgactaacccccccttctgattggctgaactggcgcgccatgcttcatcagactct

SEQ ID NO: 8167 - DNA, 196 bp, Artificial Sequence; identical to SEQ ID NO: 8166
  Synthetic polynucleotide

SEQ ID NO: 8168 - DNA, 183 bp, Artificial Sequence
  Synthetic polynucleotide
atcatctcaccttgcctcctgggagttagtacctgaggcctgcaggcctctgcccttaaccaagatggcggagacctctgcccttaaccaagatggcggtcgcctctgcccttaaccaagatggcgggaccctctgcccttaaccaagatggcggctaggcgcgccatgcttcatcagactct

SEQ ID NO: 8169 - DNA, 183 bp, Artificial Sequence; identical to SEQ ID NO: 8168
  Synthetic polynucleotide

SEQ ID NO: 8170 - DNA, 172 bp, Artificial Sequence
  Synthetic polynucleotide
atcatctcaccttgcctcctgttacgtttgggctggtgcctgcaggcccctggtggagacccctggtggtcgcccctggtgggaccccctggtggctacccctggtggactcccctggtggtgccccctggtgggtacccctggtggggcgcgccatgcttcatcagactct

SEQ ID NO: 8171 - DNA, 172 bp, Artificial Sequence; identical to SEQ ID NO: 8170
  Synthetic polynucleotide

SEQ ID NO: 8172 - DNA, 164 bp, Artificial Sequence
  Synthetic polynucleotide
atcatctcaccttgcctcctgattgttggacaaatccgcctgcaggatttccggtagaatttccggttcgatttccggtgacatttccggtctaatttccggtactatttccggttgcatttccggtgtaatttccggtggcgcgccatgcttcatcagactct

SEQ ID NO: 8173 - DNA, 164 bp, Artificial Sequence; identical to SEQ ID NO: 8172
  Synthetic polynucleotide

SEQ ID NO: 8174 - DNA, 172 bp, Artificial Sequence
  Synthetic polynucleotide
atcatctcaccttgcctcctgatcgttcaaccttccctcctgcaggtatgcattatagatatgcattattcgtatgcattatgactatgcattatctatatgcattatacttatgcattattgctatgcattatgtatatgcattatggcgcgccatgcttcatcagactct

SEQ ID NO: 8175 - DNA, 172 bp, Artificial Sequence; identical to SEQ ID NO: 8174
  Synthetic polynucleotide

SEQ ID NO: 8176 - DNA, 180 bp, Artificial Sequence
  Synthetic polynucleotide
atcatctcaccttgcctcctgtgtaacaagagtcctggcctgcaggtcaatattatcagatcaatattatctcgtcaatattatcgactcaatattatcctatcaatattatcacttcaatattatctgctcaatattatcgtatcaatattatcggcgcgccatgcttcatcagactct

SEQ ID NO: 8177 - DNA, 180 bp, Artificial Sequence; identical to SEQ ID NO: 8176
  Synthetic polynucleotide

SEQ ID NO: 8178 - DNA, 185 bp, Artificial Sequence
  Synthetic polynucleotide
atcatctcaccttgcctcctggtacatgaagcgaccgccctgcaggcattaagtacttaaagagacattaagtacttaaagtcgcattaagtacttaaaggaccattaagtacttaaagctacattaagtacttaaagactcattaagtacttaaagtgcggcgcgccatgcttcatcagactct

SEQ ID NO: 8179 - DNA, 185 bp, Artificial Sequence; identical to SEQ ID NO: 8178
  Synthetic polynucleotide

SEQ ID NO: 8180 - DNA, 188 bp, Artificial Sequence
  Synthetic polynucleotide
atcatctcaccttgcctcctgtgattctgattccactacctgcaggcacttccgggttagacacttccgggtttcgcacttccgggttgaccacttccgggttctacacttccgggttactcacttccgggtttgccacttccgggttgtacacttccgggttggcgcgccatgcttcatcagactct

SEQ ID NO: 8181 - DNA, 188 bp, Artificial Sequence; identical to SEQ ID NO: 8180
  Synthetic polynucleotide

SEQ ID NO: 8182 - DNA, 197 bp, Artificial Sequence
  Synthetic polynucleotide
atcatctcaccttgcctcctgacctgcccttatgccgacctgcagggccgccgccatcttgagagccgccgccatcttgtcggccgccgccatcttggacgccgccgccatcttgctagccgccgccatcttgactgccgccgccatcttgtgcgccgccgccatcttggtaggcgcgccatgcttcatcagactct

SEQ ID NO: 8183 - DNA, 197 bp, Artificial Sequence; identical to SEQ ID NO: 8182
  Synthetic polynucleotide

SEQ ID NO: 8184 - DNA, 196 bp, Artificial Sequence
  Synthetic polynucleotide
atcatctcaccttgcctcctggggcgacgtaattgcgtcctgcaggtacttccgggtttagatacttccgggttttcgtacttccgggtttgactacttccgggtttctatacttccgggtttacttacttccgggttttgctacttccgggtttgtatacttccgggtttggcgcgccatgcttcatcagactct

SEQ ID NO: 8185 - DNA, 196 bp, Artificial Sequence; identical to SEQ ID NO: 8184
  Synthetic polynucleotide

SEQ ID NO: 8186 - DNA, 191 bp, Artificial Sequence
  Synthetic polynucleotide
atcatctcaccttgcctcctgatctattgggaacgcttcctgcagggtaattaccgtaattaaagagtaattaccgtaattaatcggtaattaccgtaattaagacgtaattaccgtaattaactagtaattaccgtaattaaactgtaattaccgtaattaatgcggcgcgccatgcttcatcagactct

SEQ ID NO: 8187 - DNA, 191 bp, Artificial Sequence; identical to SEQ ID NO: 8186
  Synthetic polynucleotide

SEQ ID NO: 8188 - DNA, 191 bp, Artificial Sequence
  Synthetic polynucleotide
atcatctcaccttgcctcctgtcgtcagctgtgagcctcctgcagggaacaataacattgttcagagaacaataacattgttctcggaacaataacattgttcgacgaacaataacattgttcctagaacaataacattgttcactgaacaataacattgttctgcggcgcgccatgcttcatcagactct

SEQ ID NO: 8189 - DNA, 191 bp, Artificial Sequence; identical to SEQ ID NO: 8188
  Synthetic polynucleotide

SEQ ID NO: 8190 - DNA, 196 bp, Artificial Sequence
  Synthetic polynucleotide
atcatctcaccttgcctcctgcctccgttcagtcctaccctgcaggggccccgccccccagaggccccgcccccctcgggccccgccccccgacggccccgccccccctaggccccgccccccactggccccgcccccctgcggccccgccccccgtaggccccgccccccggcgcgccatgcttcatcagactct

SEQ ID NO: 8191 - DNA, 196 bp, Artificial Sequence; identical to SEQ ID NO: 8190
  Synthetic polynucleotide

SEQ ID NO: 8192 - DNA, 190 bp, Artificial Sequence
  Synthetic polynucleotide
atcatctcaccttgcctcctggatcgttcatggcactccctgcaggtacttcctctttttagatacttcctcttttttcgtacttcctctttttgactacttcctctttttctatacttcctctttttacttacttcctcttttttgctacttcctctttttgtaggcgcgccatgcttcatcagactct

SEQ ID NO: 8193 - DNA, 190 bp, Artificial Sequence; identical to SEQ ID NO: 8192
  Synthetic polynucleotide

SEQ ID NO: 8194 - DNA, 172 bp, Artificial Sequence
  Synthetic polynucleotide
atcatctcaccttgcctcctgtcggcacttagtttagccctgcaggaagcacatggagaaagcacatggtcgaagcacatgggacaagcacatggctaaagcacatggactaagcacatggtgcaagcacatgggtaaagcacatggggcgcgccatgcttcatcagactct

SEQ ID NO: 8195 - DNA, 172 bp, Artificial Sequence; identical to SEQ ID NO: 8194
  Synthetic polynucleotide

SEQ ID NO: 8196 - DNA, 190 bp, Artificial Sequence
  Synthetic polynucleotide
atcatctcaccttgcctcctgcgaaactcaacgccctacctgcagggctgtggttttcccagagctgtggttttccctcggctgtggttttcccgacgctgtggttttcccctagctgtggttttcccactgctgtggttttccctgcgctgtggttttcccgtaggcgcgccatgcttcatcagactct

SEQ ID NO: 8197 - DNA, 190 bp, Artificial Sequence; identical to SEQ ID NO: 8196
  Synthetic polynucleotide

SEQ ID NO: 8198 - DNA, 197 bp, Artificial Sequence
  Synthetic polynucleotide
atcatctcaccttgcctcctgcacgatcggagtattagcctgcagggcggccgccatcttgagagcggccgccatcttgtcggcggccgccatcttggacgcggccgccatcttgctagcggccgccatcttgactgcggccgccatcttgtgcgcggccgccatcttggtaggcgcgccatgcttcatcagactct

SEQ ID NO: 8199 - DNA, 197 bp, Artificial Sequence; identical to SEQ ID NO: 8198
  Synthetic polynucleotide

SEQ ID NO: 8200 - DNA, 164 bp, Artificial Sequence
  Synthetic polynucleotide
atcatctcaccttgcctcctgaaagtttagcgcctatgcctgcaggtgattggctagatgattggcttcgtgattggctgactgattggctctatgattggctacttgattggcttgctgattggctgtatgattggctggcgcgccatgcttcatcagactct

SEQ ID NO: 8201 - DNA, 164 bp, Artificial Sequence; identical to SEQ ID NO: 8200
  Synthetic polynucleotide

SEQ ID NO: 8202 - DNA, 190 bp, Artificial Sequence
  Synthetic polynucleotide
atcatctcaccttgcctcctgggccttccggaagacatcctgcaggggccacgcccatttagaggccacgcccattttcgggccacgcccatttgacggccacgcccatttctaggccacgcccatttactggccacgcccattttgcggccacgcccatttgtaggcgcgccatgcttcatcagactct

SEQ ID NO: 8203 - DNA, 190 bp, Artificial Sequence; identical to SEQ ID NO: 8202
  Synthetic polynucleotide

SEQ ID NO: 8204 - DNA, 164 bp, Artificial Sequence
  Synthetic polynucleotide
atcatctcaccttgcctcctgccaacaaggtagacggtcctgcaggcctgtccttagacctgtcctttcgcctgtccttgaccctgtccttctacctgtccttactcctgtcctttgccctgtccttgtacctgtccttggcgcgccatgcttcatcagactct

SEQ ID NO: 8205 - DNA, 164 bp, Artificial Sequence; identical to SEQ ID NO: 8204
  Synthetic polynucleotide

SEQ ID NO: 8206 - DNA, 197 bp, Artificial Sequence
  Synthetic polynucleotide
atcatctcaccttgcctcctgtctggatgatgtagactcctgcaggggcacccaggggtgcagaggcacccaggggtgctcgggcacccaggggtgcgacggcacccaggggtgcctaggcacccaggggtgcactggcacccaggggtgctgcggcacccaggggtgcgtaggcgcgccatgcttcatcagactct

SEQ ID NO: 8207 - DNA, 197 bp, Artificial Sequence; identical to SEQ ID NO: 8206
  Synthetic polynucleotide

SEQ ID NO: 8208 - DNA, 148 bp, Artificial Sequence
  Synthetic polynucleotide
atcatctcaccttgcctcctgcagcattcgaggaacgacctgcaggccaatctagaccaatcttcgccaatctgacccaatctctaccaatctactccaatcttgcccaatctgtaccaatctggcgcgccatgcttcatcagactct

SEQ ID NO: 8209 - DNA, 148 bp, Artificial Sequence; identical to SEQ ID NO: 8208
  Synthetic polynucleotide

SEQ ID NO: 8210 - DNA, 156 bp, Artificial Sequence
  Synthetic polynucleotide
atcatctcaccttgcctcctgtatgcctctcggtcacacctgcaggaaaatagcagaaaaatagctcgaaaatagcgacaaaatagcctaaaaatagcactaaaatagctgcaaaatagcgtaaaaatagcggcgcgccatgcttcatcagactct

SEQ ID NO: 8211 - DNA, 156 bp, Artificial Sequence; identical to SEQ ID NO: 8210
  Synthetic polynucleotide

SEQ ID NO: 8212 - DNA, 190 bp, Artificial Sequence
  Synthetic polynucleotide
atcatctcaccttgcctcctggggcctacatcgggaatcctgcaggttttggcgggaaaaagattttggcgggaaaatcgttttggcgggaaaagacttttggcgggaaaactattttggcgggaaaaactttttggcgggaaaatgcttttggcgggaaaagtaggcgcgccatgcttcatcagactct

SEQ ID NO: 8213 - DNA, 190 bp, Artificial Sequence; identical to SEQ ID NO: 8212
  Synthetic polynucleotide

SEQ ID NO: 8214 - DNA, 172 bp, Artificial Sequence
  Synthetic polynucleotide
atcatctcaccttgcctcctgagcgctaagccgaactccctgcaggaataattataagaaataattatatcgaataattatagacaataattatactaaataattataactaataattatatgcaataattatagtaaataattataggcgcgccatgcttcatcagactct

SEQ ID NO: 8215 - DNA, 172 bp, Artificial Sequence; identical to SEQ ID NO: 8214
  Synthetic polynucleotide

SEQ ID NO: 8216 - DNA, 197 bp, Artificial Sequence
  Synthetic polynucleotide
atcatctcaccttgcctcctgtgagcttaaggaaatagcctgcaggtgccaggaagtaggtcacagatgccaggaagtaggtcactcgtgccaggaagtaggtcacgactgccaggaagtaggtcacctatgccaggaagtaggtcacacttgccaggaagtaggtcactgcggcgcgccatgcttcatcagactct

SEQ ID NO: 8217 - DNA, 197 bp, Artificial Sequence; identical to SEQ ID NO: 8216
  Synthetic polynucleotide

SEQ ID NO: 8218 - DNA, 190 bp, Artificial Sequence
  Synthetic polynucleotide
atcatctcaccttgcctcctgagctctgcaagtaggtacctgcagggtcactgaagcgggagagtcactgaagcgggtcggtcactgaagcggggacgtcactgaagcgggctagtcactgaagcgggactgtcactgaagcgggtgcgtcactgaagcggggtaggcgcgccatgcttcatcagactct

SEQ ID NO: 8219 - DNA, 190 bp, Artificial Sequence; identical to SEQ ID NO: 8218
  Synthetic polynucleotide

SEQ ID NO: 8220 - DNA, 148 bp, Artificial Sequence
  Synthetic polynucleotide
atcatctcaccttgcctcctgaataggcattgtcggaacctgcaggtcacgtgagatcacgtgtcgtcacgtggactcacgtgctatcacgtgacttcacgtgtgctcacgtggtatcacgtgggcgcgccatgcttcatcagactct

SEQ ID NO: 8221 - DNA, 148 bp, Artificial Sequence; identical to SEQ ID NO: 8220
  Synthetic polynucleotide

SEQ ID NO: 8222 - DNA, 172 bp, Artificial Sequence
  Synthetic polynucleotide
atcatctcaccttgcctcctgcactctggaagtaaacacctgcaggtttggcgcgtagatttggcgcgttcgtttggcgcgtgactttggcgcgtctatttggcgcgtacttttggcgcgttgctttggcgcgtgtatttggcgcgtggcgcgccatgcttcatcagactct

SEQ ID NO: 8223 - DNA, 172 bp, Artificial Sequence; identical to SEQ ID NO: 8222
  Synthetic polynucleotide

SEQ ID NO: 8224 - DNA, 196 bp, Artificial Sequence
  Synthetic polynucleotide
atcatctcaccttgcctcctgcaccgcattagatgacacctgcaggggccccgccccctagaggccccgcccccttcgggccccgccccctgacggccccgccccctctaggccccgccccctactggccccgcccccttgcggccccgccccctgtaggccccgccccctggcgcgccatgcttcatcagactct

SEQ ID NO: 8225 - DNA, 196 bp, Artificial Sequence; identical to SEQ ID NO: 8224
  Synthetic polynucleotide

SEQ ID NO: 8226 - DNA, 180 bp, Artificial Sequence
  Synthetic polynucleotide
atcatctcaccttgcctcctggataaactgtaagcaagcctgcagggctctacccagagagctctacccagtcggctctacccaggacgctctacccagctagctctacccagactgctctacccagtgcgctctacccaggtagctctacccagggcgcgccatgcttcatcagactct

SEQ ID NO: 8227 - DNA, 180 bp, Artificial Sequence; identical to SEQ ID NO: 8226
  Synthetic polynucleotide

SEQ ID NO: 8228 - DNA, 164 bp, Artificial Sequence
  Synthetic polynucleotide
atcatctcaccttgcctcctggtttgcgctcgttgacccctgcaggctaatcggtagactaatcggttcgctaatcggtgacctaatcggtctactaatcggtactctaatcggttgcctaatcggtgtactaatcggtggcgcgccatgcttcatcagactct

SEQ ID NO: 8229 - DNA, 164 bp, Artificial Sequence; identical to SEQ ID NO: 8228
  Synthetic polynucleotide

SEQ ID NO: 8230 - DNA, 188 bp, Artificial Sequence
  Synthetic polynucleotide
atcatctcaccttgcctcctgtcctatggcaattccgtcctgcaggaacccggaagtaagaaacccggaagtatcgaacccggaagtagacaacccggaagtactaaacccggaagtaactaacccggaagtatgcaacccggaagtagtaaacccggaagtaggcgcgccatgcttcatcagactct

SEQ ID NO: 8231 - DNA, 188 bp, Artificial Sequence; identical to SEQ ID NO: 8230
  Synthetic polynucleotide

SEQ ID NO: 8232 - DNA, 172 bp, Artificial Sequence
  Synthetic polynucleotide
atcatctcaccttgcctcctgtttgattaactgtgggtcctgcaggaattgctgacagaaattgctgactcgaattgctgacgacaattgctgacctaaattgctgacactaattgctgactgcaattgctgacgtaaattgctgacggcgcgccatgcttcatcagactct

SEQ ID NO: 8233 - DNA, 172 bp, Artificial Sequence; identical to SEQ ID NO: 8232
  Synthetic polynucleotide

SEQ ID NO: 8234 - DNA, 191 bp, Artificial Sequence
  Synthetic polynucleotide
atcatctcaccttgcctcctgtttgaagaatcctgcgtcctgcaggataaattaatcccctccagaataaattaatcccctcctcgataaattaatcccctccgacataaattaatcccctccctaataaattaatcccctccactataaattaatcccctcctgcggcgcgccatgcttcatcagactct

SEQ ID NO: 8235 - DNA, 191 bp, Artificial Sequence; identical to SEQ ID NO: 8234
  Synthetic polynucleotide

SEQ ID NO: 8236 - DNA, 172 bp, Artificial Sequence
  Synthetic polynucleotide
atcatctcaccttgcctcctgatgcatagtgatcctcgcctgcagggtcacgtggcagagtcacgtggctcggtcacgtggcgacgtcacgtggcctagtcacgtggcactgtcacgtggctgcgtcacgtggcgtagtcacgtggcggcgcgccatgcttcatcagactct

SEQ ID NO: 8237 - DNA, 172 bp, Artificial Sequence; identical to SEQ ID NO: 8236
  Synthetic polynucleotide

SEQ ID NO: 8238 - DNA, 188 bp, Artificial Sequence
  Synthetic polynucleotide
atcatctcaccttgcctcctgcgccaacctggtgcattcctgcaggaacccggaagtgagaaacccggaagtgtcgaacccggaagtggacaacccggaagtgctaaacccggaagtgactaacccggaagtgtgcaacccggaagtggtaaacccggaagtgggcgcgccatgcttcatcagactct

SEQ ID NO: 8239 - DNA, 188 bp, Artificial Sequence; identical to SEQ ID NO: 8238
  Synthetic polynucleotide

SEQ ID NO: 8240 - DNA, 185 bp, Artificial Sequence
  Synthetic polynucleotide
atcatctcaccttgcctcctgcttatgtcatggcgtctcctgcaggctcgtgacctttgagaagactcgtgacctttgagatcgctcgtgacctttgagagacctcgtgacctttgagactactcgtgacctttgagaactctcgtgacctttgagatgcggcgcgccatgcttcatcagactct

SEQ ID NO: 8241 - DNA, 185 bp, Artificial Sequence; identical to SEQ ID NO: 8240
  Synthetic polynucleotide

SEQ ID NO: 8242 - DNA, 188 bp, Artificial Sequence
  Synthetic polynucleotide
atcatctcaccttgcctcctggtgtgactgatttcaaccctgcagggggattgcatctagagggattgcatcttcggggattgcatctgacgggattgcatctctagggattgcatctactgggattgcatcttgcgggattgcatctgtagggattgcatctggcgcgccatgcttcatcagactct

SEQ ID NO: 8243 - DNA, 188 bp, Artificial Sequence; identical to SEQ ID NO: 8242
  Synthetic polynucleotide

SEQ ID NO: 8244 - DNA, 188 bp, Artificial Sequence
  Synthetic polynucleotide
atcatctcaccttgcctcctgctgcctggattattacccctgcagggttgccagggaaagagttgccagggaatcggttgccagggaagacgttgccagggaactagttgccagggaaactgttgccagggaatgcgttgccagggaagtagttgccagggaaggcgcgccatgcttcatcagactct

SEQ ID NO: 8245 - DNA, 188 bp, Artificial Sequence; identical to SEQ ID NO: 8244
  Synthetic polynucleotide

SEQ ID NO: 8246 - DNA, 190 bp, Artificial Sequence
  Synthetic polynucleotide
atcatctcaccttgcctcctggatcatgtatgcagagccctgcaggtgaatgactattcaagatgaatgactattcatcgtgaatgactattcagactgaatgactattcactatgaatgactattcaacttgaatgactattcatgctgaatgactattcagtaggcgcgccatgcttcatcagactct

SEQ ID NO: 8247 - DNA, 190 bp, Artificial Sequence; identical to SEQ ID NO: 8246
  Synthetic polynucleotide

SEQ ID NO: 8248 - DNA, 191 bp, Artificial Sequence
  Synthetic polynucleotide
atcatctcaccttgcctcctgtcatctaccaaattgagcctgcagggaattttaattaaacccagagaattttaattaaaccctcggaattttaattaaacccgacgaattttaattaaacccctagaattttaattaaacccactgaattttaattaaaccctgcggcgcgccatgcttcatcagactct

SEQ ID NO: 8249 - DNA, 191 bp, Artificial Sequence; identical to SEQ ID NO: 8248
  Synthetic polynucleotide

SEQ ID NO: 8250 - DNA, 197 bp, Artificial Sequence
  Synthetic polynucleotide
atcatctcaccttgcctcctgagaccgtgcaaggtttacctgcaggtgccctgaggcaatgagatgccctgaggcaatgtcgtgccctgaggcaatggactgccctgaggcaatgctatgccctgaggcaatgacttgccctgaggcaatgtgctgccctgaggcaatggtaggcgcgccatgcttcatcagactct

SEQ ID NO: 8251 - DNA, 197 bp, Artificial Sequence; identical to SEQ ID NO: 8250
  Synthetic polynucleotide

SEQ ID NO: 8252 - DNA, 185 bp, Artificial Sequence
  Synthetic polynucleotide
atcatctcaccttgcctcctgttattggcgtctcctggcctgcagggctaattataattatcagagctaattataattatctcggctaattataattatcgacgctaattataattatcctagctaattataattatcactgctaattataattatctgcggcgcgccatgcttcatcagactct

SEQ ID NO: 8253 - DNA, 185 bp, Artificial Sequence; identical to SEQ ID NO: 8252
  Synthetic polynucleotide

SEQ ID NO: 8254 - DNA, 180 bp, Artificial Sequence
  Synthetic polynucleotide
atcatctcaccttgcctcctgacaccattggtaccactcctgcaggggccccacccaagaggccccacccatcgggccccacccagacggccccacccactaggccccacccaactggccccacccatgcggccccacccagtaggccccacccaggcgcgccatgcttcatcagactct

SEQ ID NO: 8255 - DNA, 180 bp, Artificial Sequence; identical to SEQ ID NO: 8254
  Synthetic polynucleotide

SEQ ID NO: 8256 - DNA, 180 bp, Artificial Sequence
  Synthetic polynucleotide
atcatctcaccttgcctcctgtctcactattggagcatcctgcaggtttattagggaagatttattagggatcgtttattagggagactttattagggactatttattagggaacttttattagggatgctttattagggagtatttattagggaggcgcgccatgcttcatcagactct

SEQ ID NO: 8257 - DNA, 180 bp, Artificial Sequence; identical to SEQ ID NO: 8256
  Synthetic polynucleotide

SEQ ID NO: 8258 - DNA, 197 bp, Artificial Sequence
  Synthetic polynucleotide
atcatctcaccttgcctcctgcgaaacgcccgtgttaccctgcaggatcgataaaattatcgatagaatcgataaaattatcgattcgatcgataaaattatcgatgacatcgataaaattatcgatctaatcgataaaattatcgatactatcgataaaattatcgattgcggcgcgccatgcttcatcagactct

SEQ ID NO: 8259 - DNA, 197 bp, Artificial Sequence; identical to SEQ ID NO: 8258
  Synthetic polynucleotide

SEQ ID NO: 8260 - DNA, 191 bp, Artificial Sequence
  Synthetic polynucleotide
atcatctcaccttgcctcctgtaacacgctctagaggtcctgcaggaggtcatgcaaaggtcaagaaggtcatgcaaaggtcatcgaggtcatgcaaaggtcagacaggtcatgcaaaggtcactaaggtcatgcaaaggtcaactaggtcatgcaaaggtcatgcggcgcgccatgcttcatcagactct

SEQ ID NO: 8261 - DNA, 191 bp, Artificial Sequence; identical to SEQ ID NO: 8260
  Synthetic polynucleotide

SEQ ID NO: 8262 - DNA, 172 bp, Artificial Sequence
  Synthetic polynucleotide
atcatctcaccttgcctcctgtcgaggtcctttattgccctgcaggtctcccacgcagatctcccacgctcgtctcccacgcgactctcccacgcctatctcccacgcacttctcccacgctgctctcccacgcgtatctcccacgcggcgcgccatgcttcatcagactct

SEQ ID NO: 8263 - DNA, 172 bp, Artificial Sequence; identical to SEQ ID NO: 8262
  Synthetic polynucleotide

SEQ ID NO: 8264 - DNA, 185 bp, Artificial Sequence
  Synthetic polynucleotide
atcatctcaccttgcctcctgacatagtttccggcgcgcctgcaggagagttatttttagagagaagagttatttttagagtcgagagttatttttagaggacagagttatttttagagctaagagttatttttagagactagagttatttttagagtgcggcgcgccatgcttcatcagactct

SEQ ID NO: 8265 - DNA, 185 bp, Artificial Sequence; identical to SEQ ID NO: 8264
  Synthetic polynucleotide

SEQ ID NO: 8266 - DNA, 191 bp, Artificial Sequence
  Synthetic polynucleotide
atcatctcaccttgcctcctggaagatccaccgtcccacctgcaggaaaatatgcataataaaagaaaaatatgcataataaatcgaaaatatgcataataaagacaaaatatgcataataaactaaaaatatgcataataaaactaaaatatgcataataaatgcggcgcgccatgcttcatcagactct

SEQ ID NO: 8267 - DNA, 191 bp, Artificial Sequence; identical to SEQ ID NO: 8266
  Synthetic polynucleotide

SEQ ID NO: 8268 - DNA, 172 bp, Artificial Sequence
  Synthetic polynucleotide
atcatctcaccttgcctcctgctgaaaccaagtgctctcctgcaggggtcacgtacagaggtcacgtactcgggtcacgtacgacggtcacgtacctaggtcacgtacactggtcacgtactgcggtcacgtacgtaggtcacgtacggcgcgccatgcttcatcagactct

SEQ ID NO: 8269 - DNA, 172 bp, Artificial Sequence; identical to SEQ ID NO: 8268
  Synthetic polynucleotide

SEQ ID NO: 8270 - DNA, 156 bp, Artificial Sequence
  Synthetic polynucleotide
atcatctcaccttgcctcctgactgttgccaagccaggcctgcaggtggcaaccagatggcaacctcgtggcaaccgactggcaaccctatggcaaccacttggcaacctgctggcaaccgtatggcaaccggcgcgccatgcttcatcagactct

SEQ ID NO: 8271 - DNA, 156 bp, Artificial Sequence; identical to SEQ ID NO: 8270
  Synthetic polynucleotide

SEQ ID NO: 8272 - DNA, 190 bp, Artificial Sequence
  Synthetic polynucleotide
atcatctcaccttgcctcctgggcgttatgacttaagtcctgcagggagttccaggtcagagagagttccaggtcagtcggagttccaggtcaggacgagttccaggtcagctagagttccaggtcagactgagttccaggtcagtgcgagttccaggtcaggtaggcgcgccatgcttcatcagactct

SEQ ID NO: 8273 - DNA, 190 bp, Artificial Sequence; identical to SEQ ID NO: 8272
  Synthetic polynucleotide

SEQ ID NO: 8274 - DNA, 180 bp, Artificial Sequence
  Synthetic polynucleotide
atcatctcaccttgcctcctgggactgtttagctctatcctgcaggccgcagctggcagaccgcagctggctcgccgcagctggcgacccgcagctggcctaccgcagctggcactccgcagctggctgcccgcagctggcgtaccgcagctggcggcgcgccatgcttcatcagactct

SEQ ID NO: 8275 - DNA, 180 bp, Artificial Sequence; identical to SEQ ID NO: 8274
  Synthetic polynucleotide

SEQ ID NO: 8276 - DNA, 188 bp, Artificial Sequence
  Synthetic polynucleotide
atcatctcaccttgcctcctgccagcccgaatgcattccctgcaggaaacaaacatccagaaaacaaacatcctcgaaacaaacatccgacaaacaaacatccctaaaacaaacatccactaaacaaacatcctgcaaacaaacatccgtaaaacaaacatccggcgcgccatgcttcatcagactct

SEQ ID NO: 8277 - DNA, 188 bp, Artificial Sequence; identical to SEQ ID NO: 8276
  Synthetic polynucleotide

SEQ ID NO: 8278 - DNA, 156 bp, Artificial Sequence
  Synthetic polynucleotide
atcatctcaccttgcctcctgccgagtcggaacttgcacctgcagggccataaaagagccataaatcggccataaagacgccataaactagccataaaactgccataaatgcgccataaagtagccataaaggcgcgccatgcttcatcagactct

SEQ ID NO: 8279 - DNA, 156 bp, Artificial Sequence; identical to SEQ ID NO: 8278
  Synthetic polynucleotide

SEQ ID NO: 8280 - DNA, 188 bp, Artificial Sequence
  Synthetic polynucleotide
atcatctcaccttgcctcctgtgagtcgggtgctactccctgcaggcattgtgtccgtagacattgtgtccgttcgcattgtgtccgtgaccattgtgtccgtctacattgtgtccgtactcattgtgtccgttgccattgtgtccgtgtacattgtgtccgtggcgcgccatgcttcatcagactct

SEQ ID NO: 8281 - DNA, 188 bp, Artificial Sequence; identical to SEQ ID NO: 8280
  Synthetic polynucleotide

SEQ ID NO: 8282 - DNA, 197 bp, Artificial Sequence
  Synthetic polynucleotide
atcatctcaccttgcctcctgatcgccgaccgttaacccctgcaggaagtaggtcaaaggtcacagaaagtaggtcaaaggtcactcgaagtaggtcaaaggtcacgacaagtaggtcaaaggtcacctaaagtaggtcaaaggtcacactaagtaggtcaaaggtcactgcggcgcgccatgcttcatcagactct

SEQ ID NO: 8283 - DNA, 197 bp, Artificial Sequence; identical to SEQ ID NO: 8282
  Synthetic polynucleotide

SEQ ID NO: 8284 - DNA, 196 bp, Artificial Sequence
  Synthetic polynucleotide
atcatctcaccttgcctcctgagaagcgccctatgcgtcctgcaggaggtcattaacccagaaggtcattaaccctcgaggtcattaacccgacaggtcattaacccctaaggtcattaacccactaggtcattaaccctgcaggtcattaacccgtaaggtcattaacccggcgcgccatgcttcatcagactct

SEQ ID NO: 8285 - DNA, 196 bp, Artificial Sequence; identical to SEQ ID NO: 8284
  Synthetic polynucleotide

SEQ ID NO: 8286 - DNA, 196 bp, Artificial Sequence
  Synthetic polynucleotide
atcatctcaccttgcctcctgccacataactttagagtcctgcaggaacatgtataaaaagaaacatgtataaaatcgaacatgtataaaagacaacatgtataaaactaaacatgtataaaaactaacatgtataaaatgcaacatgtataaaagtaaacatgtataaaaggcgcgccatgcttcatcagactct

SEQ ID NO: 8287 - DNA, 196 bp, Artificial Sequence; identical to SEQ ID NO: 8286
  Synthetic polynucleotide

SEQ ID NO: 8288 - DNA, 156 bp, Artificial Sequence
  Synthetic polynucleotide
atcatctcaccttgcctcctgttgtctgcgctactattcctgcagggtcacgcaagagtcacgcatcggtcacgcagacgtcacgcactagtcacgcaactgtcacgcatgcgtcacgcagtagtcacgcaggcgcgccatgcttcatcagactct

SEQ ID NO: 8289 - DNA, 156 bp, Artificial Sequence; identical to SEQ ID NO: 8288
  Synthetic polynucleotide

SEQ ID NO: 8290 - DNA, 180 bp, Artificial Sequence
  Synthetic polynucleotide
atcatctcaccttgcctcctggccagaccgcctataatcctgcaggggccataaaaaagaggccataaaaatcgggccataaaaagacggccataaaaactaggccataaaaaactggccataaaaatgcggccataaaaagtaggccataaaaaggcgcgccatgcttcatcagactct

SEQ ID NO: 8291 - DNA, 180 bp, Artificial Sequence; identical to SEQ ID NO: 8290
  Synthetic polynucleotide

SEQ ID NO: 8292 - DNA, 196 bp, Artificial Sequence
  Synthetic polynucleotide
atcatctcaccttgcctcctggtccataattctaggatcctgcaggttaattagattagagattaattagattagtcgttaattagattaggacttaattagattagctattaattagattagactttaattagattagtgcttaattagattaggtattaattagattagggcgcgccatgcttcatcagactct

SEQ ID NO: 8293 - DNA, 196 bp, Artificial Sequence; identical to SEQ ID NO: 8292
  Synthetic polynucleotide

SEQ ID NO: 8294 - DNA, 172 bp, Artificial Sequence
  Synthetic polynucleotide
atcatctcaccttgcctcctggtttgaaactaggcgatcctgcaggatttccgggtagaatttccgggttcgatttccgggtgacatttccgggtctaatttccgggtactatttccgggttgcatttccgggtgtaatttccgggtggcgcgccatgcttcatcagactct

SEQ ID NO: 8295 - DNA, 172 bp, Artificial Sequence; identical to SEQ ID NO: 8294
  Synthetic polynucleotide

SEQ ID NO: 8296 - DNA, 185 bp, Artificial Sequence
  Synthetic polynucleotide
atcatctcaccttgcctcctgcaattgcccgagtcattcctgcaggtgtttatttacttaccagatgtttatttacttacctcgtgtttatttacttaccgactgtttatttacttaccctatgtttatttacttaccacttgtttatttacttacctgcggcgcgccatgcttcatcagactct

SEQ ID NO: 8297 - DNA, 185 bp, Artificial Sequence; identical to SEQ ID NO: 8296
  Synthetic polynucleotide

SEQ ID NO: 8298 - DNA, 180 bp, Artificial Sequence
  Synthetic polynucleotide
atcatctcaccttgcctcctgtcgcaagacacgacaaccctgcaggagacaagataaagaagacaagataatcgagacaagataagacagacaagataactaagacaagataaactagacaagataatgcagacaagataagtaagacaagataaggcgcgccatgcttcatcagactct

SEQ ID NO: 8299 - DNA, 180 bp, Artificial Sequence; identical to SEQ ID NO: 8298
  Synthetic polynucleotide

SEQ ID NO: 8300 - DNA, 197 bp, Artificial Sequence
  Synthetic polynucleotide
atcatctcaccttgcctcctgccgctgataacacttagcctgcaggaggtgtgaagtcacacctagaaggtgtgaagtcacaccttcgaggtgtgaagtcacacctgacaggtgtgaagtcacacctctaaggtgtgaagtcacacctactaggtgtgaagtcacaccttgcggcgcgccatgcttcatcagactct

SEQ ID NO: 8301 - DNA, 197 bp, Artificial Sequence; identical to SEQ ID NO: 8300
  Synthetic polynucleotide

SEQ ID NO: 8302 - DNA, 164 bp, Artificial Sequence
  Synthetic polynucleotide
atcatctcaccttgcctcctgagtgataccctgcagtacctgcaggtcacgtgacagatcacgtgactcgtcacgtgacgactcacgtgacctatcacgtgacacttcacgtgactgctcacgtgacgtatcacgtgacggcgcgccatgcttcatcagactct

SEQ ID NO: 8303 - DNA, 164 bp, Artificial Sequence; identical to SEQ ID NO: 8302
  Synthetic polynucleotide

SEQ ID NO: 8304 - DNA, 190 bp, Artificial Sequence
  Synthetic polynucleotide
atcatctcaccttgcctcctgaagtacatcctccctttcctgcaggggccacgcccacttagaggccacgcccactttcgggccacgcccacttgacggccacgcccacttctaggccacgcccacttactggccacgcccactttgcggccacgcccacttgtaggcgcgccatgcttcatcagactct

SEQ ID NO: 8305 - DNA, 190 bp, Artificial Sequence; identical to SEQ ID NO: 8304
  Synthetic polynucleotide

SEQ ID NO: 8306 - DNA, 200 bp, Artificial Sequence
  Synthetic polynucleotide
atcatctcaccttgcctcctgctcggttcactttcgcccctgcaggcgttgacctttgacctttaagacgttgacctttgacctttatcgcgttgacctttgacctttagaccgttgacctttgacctttactacgttgacctttgacctttaactcgttgacctttgacctttaggcgcgccatgcttcatcagactct

SEQ ID NO: 8307 - DNA, 200 bp, Artificial Sequence; identical to SEQ ID NO: 8306
  Synthetic polynucleotide

SEQ ID NO: 8308 - DNA, 197 bp, Artificial Sequence
  Synthetic polynucleotide
atcatctcaccttgcctcctgtacacaggccctgaagtcctgcaggatcgataattttatcgatagaatcgataattttatcgattcgatcgataattttatcgatgacatcgataattttatcgatctaatcgataattttatcgatactatcgataattttatcgattgcggcgcgccatgcttcatcagactct

SEQ ID NO: 8309 - DNA, 197 bp, Artificial Sequence; identical to SEQ ID NO: 8308
  Synthetic polynucleotide

SEQ ID NO: 8310 - DNA, 172 bp, Artificial Sequence
  Synthetic polynucleotide
atcatctcaccttgcctcctgttaacggagctgtacctcctgcaggattgtgcaatagaattgtgcaattcgattgtgcaatgacattgtgcaatctaattgtgcaatactattgtgcaattgcattgtgcaatgtaattgtgcaatggcgcgccatgcttcatcagactct

SEQ ID NO: 8311 - DNA, 172 bp, Artificial Sequence; identical to SEQ ID NO: 8310
  Synthetic polynucleotide

SEQ ID NO: 8312 - DNA, 172 bp, Artificial Sequence
  Synthetic polynucleotide
atcatctcaccttgcctcctggataatagcggccatggcctgcagggggcgcggggagagggcgcggggtcggggcgcgggggacgggcgcggggctagggcgcggggactgggcgcggggtgcgggcgcgggggtagggcgcggggggcgcgccatgcttcatcagactct

SEQ ID NO: 8313 - DNA, 172 bp, Artificial Sequence; identical to SEQ ID NO: 8312
  Synthetic polynucleotide

SEQ ID NO: 8314 - DNA, 164 bp, Artificial Sequence
  Synthetic polynucleotide
atcatctcaccttgcctcctgctgagccagtataacttcctgcaggaacaggtgtagaaacaggtgttcgaacaggtgtgacaacaggtgtctaaacaggtgtactaacaggtgttgcaacaggtgtgtaaacaggtgtggcgcgccatgcttcatcagactct

SEQ ID NO: 8315 - DNA, 164 bp, Artificial Sequence; identical to SEQ ID NO: 8314
  Synthetic polynucleotide

SEQ ID NO: 8316 - DNA, 190 bp, Artificial Sequence
  Synthetic polynucleotide
atcatctcaccttgcctcctgggaatatgcgcatcaagcctgcaggtatgaccttgatctagatatgaccttgatcttcgtatgaccttgatctgactatgaccttgatctctatatgaccttgatctacttatgaccttgatcttgctatgaccttgatctgtaggcgcgccatgcttcatcagactct

SEQ ID NO: 8317 - DNA, 190 bp, Artificial Sequence; identical to SEQ ID NO: 8316
  Synthetic polynucleotide

SEQ ID NO: 8318 - DNA, 172 bp, Artificial Sequence
  Synthetic polynucleotide
atcatctcaccttgcctcctggagcgtgccacctaactcctgcaggtaccccccacagataccccccactcgtaccccccacgactaccccccacctataccccccacacttaccccccactgctaccccccacgtataccccccacggcgcgccatgcttcatcagactct

SEQ ID NO: 8319 - DNA, 172 bp, Artificial Sequence; identical to SEQ ID NO: 8318
  Synthetic polynucleotide

SEQ ID NO: 8320 - DNA, 172 bp, Artificial Sequence
  Synthetic polynucleotide
atcatctcaccttgcctcctgcagttgtctacattactcctgcagggacaggtggtagagacaggtggttcggacaggtggtgacgacaggtggtctagacaggtggtactgacaggtggttgcgacaggtggtgtagacaggtggtggcgcgccatgcttcatcagactct

SEQ ID NO: 8321 - DNA, 172 bp, Artificial Sequence; identical to SEQ ID NO: 8320
  Synthetic polynucleotide

SEQ ID NO: 8322 - DNA, 172 bp, Artificial Sequence
  Synthetic polynucleotide
atcatctcaccttgcctcctggaaacggttctccacgacctgcagggatgagtcatagagatgagtcattcggatgagtcatgacgatgagtcatctagatgagtcatactgatgagtcattgcgatgagtcatgtagatgagtcatggcgcgccatgcttcatcagactct

SEQ ID NO: 8323 - DNA, 172 bp, Artificial Sequence; identical to SEQ ID NO: 8322
  Synthetic polynucleotide

SEQ ID NO: 8324 - DNA, 180 bp, Artificial Sequence
  Synthetic polynucleotide
atcatctcaccttgcctcctggtttcttcgctgagttacctgcaggaccgccattttagaaccgccatttttcgaccgccattttgacaccgccattttctaaccgccattttactaccgccatttttgcaccgccattttgtaaccgccattttggcgcgccatgcttcatcagactct

SEQ ID NO: 8325 - DNA, 180 bp, Artificial Sequence; identical to SEQ ID NO: 8324
  Synthetic polynucleotide

SEQ ID NO: 8326 - DNA, 196 bp, Artificial Sequence
  Synthetic polynucleotide
atcatctcaccttgcctcctgggctatgatgtagccgtcctgcaggttgattaaattagagattgattaaattagtcgttgattaaattaggacttgattaaattagctattgattaaattagactttgattaaattagtgcttgattaaattaggtattgattaaattagggcgcgccatgcttcatcagactct

SEQ ID NO: 8327 - DNA, 196 bp, Artificial Sequence; identical to SEQ ID NO: 8326
  Synthetic polynucleotide

SEQ ID NO: 8328 - DNA, 164 bp, Artificial Sequence
  Synthetic polynucleotide
atcatctcaccttgcctcctgcagtaggtttgaatctgcctgcaggatgagtcatagaatgagtcattcgatgagtcatgacatgagtcatctaatgagtcatactatgagtcattgcatgagtcatgtaatgagtcatggcgcgccatgcttcatcagactct

SEQ ID NO: 8329 - DNA, 164 bp, Artificial Sequence; identical to SEQ ID NO: 8328
  Synthetic polynucleotide

SEQ ID NO: 8330 - DNA, 197 bp, Artificial Sequence
  Synthetic polynucleotide
atcatctcaccttgcctcctgtccgggacggtttcgttcctgcaggatcaatgcaattgatagaatcaatgcaattgattcgatcaatgcaattgatgacatcaatgcaattgatctaatcaatgcaattgatactatcaatgcaattgattgcatcaatgcaattgatgtaggcgcgccatgcttcatcagactct

SEQ ID NO: 8331 - DNA, 197 bp, Artificial Sequence; identical to SEQ ID NO: 8330
  Synthetic polynucleotide

SEQ ID NO: 8332 - DNA, 197 bp, Artificial Sequence
  Synthetic polynucleotide
atcatctcaccttgcctcctgaaatgggatttgaccagcctgcaggctctcgcgagatctgagactctcgcgagatctgtcgctctcgcgagatctggacctctcgcgagatctgctactctcgcgagatctgactctctcgcgagatctgtgcctctcgcgagatctggtaggcgcgccatgcttcatcagactct

SEQ ID NO: 8333 - DNA, 197 bp, Artificial Sequence; identical to SEQ ID NO: 8332
  Synthetic polynucleotide

SEQ ID NO: 8334 - DNA, 196 bp, Artificial Sequence
  Synthetic polynucleotide
atcatctcaccttgcctcctgtctcttcgtcagcagctcctgcaggctttcccgcccccagactttcccgccccctcgctttcccgcccccgacctttcccgcccccctactttcccgcccccactctttcccgccccctgcctttcccgcccccgtactttcccgcccccggcgcgccatgcttcatcagactct

SEQ ID NO: 8335 - DNA, 196 bp, Artificial Sequence; identical to SEQ ID NO: 8334
  Synthetic polynucleotide

SEQ ID NO: 8336 - DNA, 172 bp, Artificial Sequence
  Synthetic polynucleotide
atcatctcaccttgcctcctgctggtcacttgctgggacctgcaggtttcctggaaagatttcctggaatcgtttcctggaagactttcctggaactatttcctggaaacttttcctggaatgctttcctggaagtatttcctggaaggcgcgccatgcttcatcagactct

SEQ ID NO: 8337 - DNA, 172 bp, Artificial Sequence; identical to SEQ ID NO: 8336
  Synthetic polynucleotide

SEQ ID NO: 8338 - DNA, 196 bp, Artificial Sequence
  Synthetic polynucleotide
atcatctcaccttgcctcctgtccgttgttgtctaacccctgcaggaggggatttccaaagaaggggatttccaatcgaggggatttccaagacaggggatttccaactaaggggatttccaaactaggggatttccaatgcaggggatttccaagtaaggggatttccaaggcgcgccatgcttcatcagactct

SEQ ID NO: 8339 - DNA, 196 bp, Artificial Sequence; identical to SEQ ID NO: 8338
  Synthetic polynucleotide

SEQ ID NO: 8340 - DNA, 185 bp, Artificial Sequence
  Synthetic polynucleotide
atcatctcaccttgcctcctgccgacttccgcgttagtcctgcaggattttattgttctaaaagaattttattgttctaaatcgattttattgttctaaagacattttattgttctaaactaattttattgttctaaaactattttattgttctaaatgcggcgcgccatgcttcatcagactct

SEQ ID NO: 8341 - DNA, 185 bp, Artificial Sequence; identical to SEQ ID NO: 8340
  Synthetic polynucleotide

SEQ ID NO: 8342 - DNA, 191 bp, Artificial Sequence
  Synthetic polynucleotide
atcatctcaccttgcctcctgtgcaatatcgtggcatacctgcaggaatcaataacattgatcagaaatcaataacattgatctcgaatcaataacattgatcgacaatcaataacattgatcctaaatcaataacattgatcactaatcaataacattgatctgcggcgcgccatgcttcatcagactct

SEQ ID NO: 8343 - DNA, 191 bp, Artificial Sequence; identical to SEQ ID NO: 8342
  Synthetic polynucleotide

SEQ ID NO: 8344 - DNA, 180 bp, Artificial Sequence
  Synthetic polynucleotide
atcatctcaccttgcctcctgataaaccgtaacgaaagcctgcaggataaggaagtaagaataaggaagtatcgataaggaagtagacataaggaagtactaataaggaagtaactataaggaagtatgcataaggaagtagtaataaggaagtaggcgcgccatgcttcatcagactct

SEQ ID NO: 8345 - DNA, 180 bp, Artificial Sequence; identical to SEQ ID NO: 8344
  Synthetic polynucleotide

SEQ ID NO: 8346 - DNA, 180 bp, Artificial Sequence
  Synthetic polynucleotide
atcatctcaccttgcctcctgcggtccaatgcaccacacctgcaggggggaatccccagaggggaatcccctcgggggaatccccgacggggaatccccctaggggaatccccactggggaatcccctgcggggaatccccgtaggggaatccccggcgcgccatgcttcatcagactct

SEQ ID NO: 8347 - DNA, 180 bp, Artificial Sequence; identical to SEQ ID NO: 8346
  Synthetic polynucleotide

SEQ ID NO: 8348 - DNA, 156 bp, Artificial Sequence
  Synthetic polynucleotide
atcatctcaccttgcctcctgagcgaatcaggagtaggcctgcaggcttaatgaagacttaatgatcgcttaatgagaccttaatgactacttaatgaactcttaatgatgccttaatgagtacttaatgaggcgcgccatgcttcatcagactct

SEQ ID NO: 8349 - DNA, 156 bp, Artificial Sequence; identical to SEQ ID NO: 8348
  Synthetic polynucleotide

SEQ ID NO: 8350 - DNA, 191 bp, Artificial Sequence
  Synthetic polynucleotide
atcatctcaccttgcctcctgcatttccagaacttctacctgcaggtgagggggattaactatagatgagggggattaactattcgtgagggggattaactatgactgagggggattaactatctatgagggggattaactatacttgagggggattaactattgcggcgcgccatgcttcatcagactct

SEQ ID NO: 8351 - DNA, 191 bp, Artificial Sequence; identical to SEQ ID NO: 8350
  Synthetic polynucleotide

SEQ ID NO: 8352 - DNA, 164 bp, Artificial Sequence
  Synthetic polynucleotide
atcatctcaccttgcctcctgcgttaactcggtgtagacctgcaggggcaggtggagaggcaggtggtcgggcaggtgggacggcaggtggctaggcaggtggactggcaggtggtgcggcaggtgggtaggcaggtggggcgcgccatgcttcatcagactct

SEQ ID NO: 8353 - DNA, 164 bp, Artificial Sequence; identical to SEQ ID NO: 8352
  Synthetic polynucleotide

SEQ ID NO: 8354 - DNA, 185 bp, Artificial Sequence
  Synthetic polynucleotide
atcatctcaccttgcctcctgcataaacgcacaagctgcctgcaggggtaggttggcatagtagaggtaggttggcatagttcgggtaggttggcatagtgacggtaggttggcatagtctaggtaggttggcatagtactggtaggttggcatagttgcggcgcgccatgcttcatcagactct

SEQ ID NO: 8355 - DNA, 185 bp, Artificial Sequence; identical to SEQ ID NO: 8354
  Synthetic polynucleotide

SEQ ID NO: 8356 - DNA, 191 bp, Artificial Sequence
  Synthetic polynucleotide
atcatctcaccttgcctcctgtaaggtgttctcacatacctgcaggcaattcttatctctataagacaattcttatctctatatcgcaattcttatctctatagaccaattcttatctctatactacaattcttatctctataactcaattcttatctctatatgcggcgcgccatgcttcatcagactct

SEQ ID NO: 8357 - DNA, 191 bp, Artificial Sequence; identical to SEQ ID NO: 8356
  Synthetic polynucleotide

SEQ ID NO: 8358 - DNA, 196 bp, Artificial Sequence
  Synthetic polynucleotide
atcatctcaccttgcctcctggattaagttacctttggcctgcaggttaattagattaaagattaattagattaatcgttaattagattaagacttaattagattaactattaattagattaaactttaattagattaatgcttaattagattaagtattaattagattaaggcgcgccatgcttcatcagactct

SEQ ID NO: 8359 - DNA, 196 bp, Artificial Sequence; identical to SEQ ID NO: 8358
  Synthetic polynucleotide

SEQ ID NO: 8360 - DNA, 180 bp, Artificial Sequence
  Synthetic polynucleotide
atcatctcaccttgcctcctgtaagcagttgcctgaagcctgcaggtgtaatcccaaagatgtaatcccaatcgtgtaatcccaagactgtaatcccaactatgtaatcccaaacttgtaatcccaatgctgtaatcccaagtatgtaatcccaaggcgcgccatgcttcatcagactct

SEQ ID NO: 8361 - DNA, 180 bp, Artificial Sequence; identical to SEQ ID NO: 8360
  Synthetic polynucleotide

SEQ ID NO: 8362 - DNA, 148 bp, Artificial Sequence
  Synthetic polynucleotide
atcatctcaccttgcctcctgttgacaacgcgctatgtcctgcaggctaatgaagactaatgatcgctaatgagacctaatgactactaatgaactctaatgatgcctaatgagtactaatgaggcgcgccatgcttcatcagactct

SEQ ID NO: 8363 - DNA, 148 bp, Artificial Sequence; identical to SEQ ID NO: 8362
  Synthetic polynucleotide

SEQ ID NO: 8364 - DNA, 164 bp, Artificial Sequence
  Synthetic polynucleotide
atcatctcaccttgcctcctgtatccagttactgggtgcctgcaggatgagtcagagaatgagtcagtcgatgagtcaggacatgagtcagctaatgagtcagactatgagtcagtgcatgagtcaggtaatgagtcagggcgcgccatgcttcatcagactct

SEQ ID NO: 8365 - DNA, 164 bp, Artificial Sequence; identical to SEQ ID NO: 8364
  Synthetic polynucleotide

SEQ ID NO: 8366 - DNA, 180 bp, Artificial Sequence
  Synthetic polynucleotide
atcatctcaccttgcctcctggcccgcggtaataaggtcctgcagggttatgtaacaagagttatgtaacatcggttatgtaacagacgttatgtaacactagttatgtaacaactgttatgtaacatgcgttatgtaacagtagttatgtaacaggcgcgccatgcttcatcagactct

SEQ ID NO: 8367 - DNA, 180 bp, Artificial Sequence; identical to SEQ ID NO: 8366
  Synthetic polynucleotide

SEQ ID NO: 8368 - DNA, 172 bp, Artificial Sequence
  Synthetic polynucleotide
atcatctcaccttgcctcctgggcacaaagatagcctacctgcagggggggtggggagagggggtggggtcggggggtgggggacgggggtggggctagggggtggggactgggggtggggtgcgggggtgggggtagggggtggggggcgcgccatgcttcatcagactct

SEQ ID NO: 8369 - DNA, 172 bp, Artificial Sequence; identical to SEQ ID NO: 8368
  Synthetic polynucleotide

SEQ ID NO: 8370 - DNA, 180 bp, Artificial Sequence
  Synthetic polynucleotide
atcatctcaccttgcctcctgcctacaagctggactcgcctgcaggaaatcactgcaagaaaatcactgcatcgaaatcactgcagacaaatcactgcactaaaatcactgcaactaaatcactgcatgcaaatcactgcagtaaaatcactgcaggcgcgccatgcttcatcagactct

SEQ ID NO: 8371 - DNA, 180 bp, Artificial Sequence; identical to SEQ ID NO: 8370
  Synthetic polynucleotide

SEQ ID NO: 8372 - DNA, 172 bp, Artificial Sequence
  Synthetic polynucleotide
atcatctcaccttgcctcctgcttgggcaaacacgcctcctgcagggatgagtcagagagatgagtcagtcggatgagtcaggacgatgagtcagctagatgagtcagactgatgagtcagtgcgatgagtcaggtagatgagtcagggcgcgccatgcttcatcagactct

SEQ ID NO: 8373 - DNA, 172 bp, Artificial Sequence; identical to SEQ ID NO: 8372
  Synthetic polynucleotide

SEQ ID NO: 8374 - DNA, 164 bp, Artificial Sequence
  Synthetic polynucleotide
atcatctcaccttgcctcctgcactaaactcgagtagccctgcaggtggcagttgagatggcagttgtcgtggcagttggactggcagttgctatggcagttgacttggcagttgtgctggcagttggtatggcagttgggcgcgccatgcttcatcagactct

SEQ ID NO: 8375 - DNA, 164 bp, Artificial Sequence; identical to SEQ ID NO: 8374
  Synthetic polynucleotide

SEQ ID NO: 8376 - DNA, 172 bp, Artificial Sequence
  Synthetic polynucleotide
atcatctcaccttgcctcctgggtttcgtgggacctcacctgcaggagtaattaacagaagtaattaactcgagtaattaacgacagtaattaacctaagtaattaacactagtaattaactgcagtaattaacgtaagtaattaacggcgcgccatgcttcatcagactct

SEQ ID NO: 8377 - DNA, 172 bp, Artificial Sequence; identical to SEQ ID NO: 8376
  Synthetic polynucleotide

SEQ ID NO: 8378 - DNA, 190 bp, Artificial Sequence
  Synthetic polynucleotide
atcatctcaccttgcctcctgggcttactatggatgcacctgcaggccaaccggaagtccagaccaaccggaagtcctcgccaaccggaagtccgacccaaccggaagtccctaccaaccggaagtccactccaaccggaagtcctgcccaaccggaagtccgtaggcgcgccatgcttcatcagactct

SEQ ID NO: 8379 - DNA, 190 bp, Artificial Sequence; identical to SEQ ID NO: 8378
  Synthetic polynucleotide

SEQ ID NO: 8380 - DNA, 172 bp, Artificial Sequence
  Synthetic polynucleotide
atcatctcaccttgcctcctgtggcgcaagacttggtccctgcaggttacgcaatcagattacgcaatctcgttacgcaatcgacttacgcaatcctattacgcaatcactttacgcaatctgcttacgcaatcgtattacgcaatcggcgcgccatgcttcatcagactct

SEQ ID NO: 8381 - DNA, 172 bp, Artificial Sequence; identical to SEQ ID NO: 8380
  Synthetic polynucleotide

SEQ ID NO: 8382 - DNA, 164 bp, Artificial Sequence
  Synthetic polynucleotide
atcatctcaccttgcctcctgcattcgactgataggaccctgcaggggccagacaagaggccagacatcgggccagacagacggccagacactaggccagacaactggccagacatgcggccagacagtaggccagacaggcgcgccatgcttcatcagactct

SEQ ID NO: 8383 - DNA, 164 bp, Artificial Sequence; identical to SEQ ID NO: 8382
  Synthetic polynucleotide

SEQ ID NO: 8384 - DNA, 172 bp, Artificial Sequence
  Synthetic polynucleotide
atcatctcaccttgcctcctgtccactcgtgcaattctcctgcaggggtcacgtgcagaggtcacgtgctcgggtcacgtgcgacggtcacgtgcctaggtcacgtgcactggtcacgtgctgcggtcacgtgcgtaggtcacgtgcggcgcgccatgcttcatcagactct

SEQ ID NO: 8385 - DNA, 172 bp, Artificial Sequence; identical to SEQ ID NO: 8384
  Synthetic polynucleotide

SEQ ID NO: 8386 - DNA, 172 bp, Artificial Sequence
  Synthetic polynucleotide
atcatctcaccttgcctcctgatccgtactatatatggcctgcaggtaaccacaaaagataaccacaaatcgtaaccacaaagactaaccacaaactataaccacaaaacttaaccacaaatgctaaccacaaagtataaccacaaaggcgcgccatgcttcatcagactct

SEQ ID NO: 8387 - DNA, 172 bp, Artificial Sequence; identical to SEQ ID NO: 8386
  Synthetic polynucleotide

SEQ ID NO: 8388 - DNA, 172 bp, Artificial Sequence
  Synthetic polynucleotide
atcatctcaccttgcctcctgacggaaggcgaacgttgcctgcaggggtcacgtggagaggtcacgtggtcgggtcacgtgggacggtcacgtggctaggtcacgtggactggtcacgtggtgcggtcacgtgggtaggtcacgtggggcgcgccatgcttcatcagactct

SEQ ID NO: 8389 - DNA, 172 bp, Artificial Sequence; identical to SEQ ID NO: 8388
  Synthetic polynucleotide

SEQ ID NO: 8390 - DNA, 196 bp, Artificial Sequence
  Synthetic polynucleotide
atcatctcaccttgcctcctggctagcgtttatagagtcctgcaggtactgattatgcatatttttaaagatactgattatgcatatttttaatcgtactgattatgcatatttttaagactactgattatgcatatttttaactatactgattatgcatatttttaaactggcgcgccatgcttcatcagactct

SEQ ID NO: 8391 - DNA, 196 bp, Artificial Sequence; identical to SEQ ID NO: 8390
  Synthetic polynucleotide

SEQ ID NO: 8392 - DNA, 185 bp, Artificial Sequence
  Synthetic polynucleotide
atcatctcaccttgcctcctgtcatgtagcatgtgcatcctgcaggcatttaacaccaattaagacatttaacaccaattatcgcatttaacaccaattagaccatttaacaccaattactacatttaacaccaattaactcatttaacaccaattatgcggcgcgccatgcttcatcagactct

SEQ ID NO: 8393 - DNA, 185 bp, Artificial Sequence; identical to SEQ ID NO: 8392
  Synthetic polynucleotide

SEQ ID NO: 8394 - DNA, 186 bp, Artificial Sequence
  Synthetic polynucleotide
atcatctcaccttgcctcctgaaacctgttattgcaagcctgcaggctggtgggggcagataaggaagactggtgggggcagataaggatcgctggtgggggcagataaggagacctggtgggggcagataaggactactggtgggggcagataaggaactggcgcgccatgcttcatcagactct

SEQ ID NO: 8395 - DNA, 186 bp, Artificial Sequence; identical to SEQ ID NO: 8394
  Synthetic polynucleotide

SEQ ID NO: 8396 - DNA, 172 bp, Artificial Sequence
  Synthetic polynucleotide
atcatctcaccttgcctcctgaccgtcagataataggccctgcaggattgacaggtagaattgacaggttcgattgacaggtgacattgacaggtctaattgacaggtactattgacaggttgcattgacaggtgtaattgacaggtggcgcgccatgcttcatcagactct

SEQ ID NO: 8397 - DNA, 172 bp, Artificial Sequence; identical to SEQ ID NO: 8396
  Synthetic polynucleotide

SEQ ID NO: 8398 - DNA, 196 bp, Artificial Sequence
  Synthetic polynucleotide
atcatctcaccttgcctcctgttgtagccgatggtgggcctgcaggagggggcgcagctgcgtcccctagaagggggcgcagctgcgtccccttcgagggggcgcagctgcgtcccctgacagggggcgcagctgcgtcccctctaagggggcgcagctgcgtcccctactggcgcgccatgcttcatcagactct

SEQ ID NO: 8399 - DNA, 196 bp, Artificial Sequence; identical to SEQ ID NO: 8398
  Synthetic polynucleotide

SEQ ID NO: 8400 - DNA, 172 bp, Artificial Sequence
  Synthetic polynucleotide
atcatctcaccttgcctcctggacattgctgacaatgccctgcagggctaattactagagctaattacttcggctaattactgacgctaattactctagctaattactactgctaattacttgcgctaattactgtagctaattactggcgcgccatgcttcatcagactct

SEQ ID NO: 8401 - DNA, 172 bp, Artificial Sequence; identical to SEQ ID NO: 8400
  Synthetic polynucleotide

SEQ ID NO: 8402 - DNA, 179 bp, Artificial Sequence
  Synthetic polynucleotide
atcatctcaccttgcctcctgtcctgtacggagcaacgcctgcaggcagaaagatgacgtgtcatttaatagacagaaagatgacgtgtcatttaattcgcagaaagatgacgtgtcatttaatgaccagaaagatgacgtgtcatttaatctaggcgcgccatgcttcatcagactct

SEQ ID NO: 8403 - DNA, 179 bp, Artificial Sequence; identical to SEQ ID NO: 8402
  Synthetic polynucleotide

SEQ ID NO: 8404 - DNA, 148 bp, Artificial Sequence
  Synthetic polynucleotide
atcatctcaccttgcctcctggtcggcatccatcgttacctgcaggaaacaaaagaaaacaaatcgaaacaaagacaaacaaactaaaacaaaactaaacaaatgcaaacaaagtaaaacaaaggcgcgccatgcttcatcagactct

SEQ ID NO: 8405 - DNA, 148 bp, Artificial Sequence; identical to SEQ ID NO: 8404
  Synthetic polynucleotide

SEQ ID NO: 8406 - DNA, 188 bp, Artificial Sequence
  Synthetic polynucleotide
atcatctcaccttgcctcctggtcagacattggcaacacctgcagggggctcaggtggagagggctcaggtggtcggggctcaggtgggacgggctcaggtggctagggctcaggtggactgggctcaggtggtgcgggctcaggtgggtagggctcaggtggggcgcgccatgcttcatcagactct

SEQ ID NO: 8407 - DNA, 188 bp, Artificial Sequence; identical to SEQ ID NO: 8406
  Synthetic polynucleotide

SEQ ID NO: 8408 - DNA, 172 bp, Artificial Sequence
  Synthetic polynucleotide
atcatctcaccttgcctcctgcgctctggtactagaggcctgcagggtcacgtgatagagtcacgtgattcggtcacgtgatgacgtcacgtgatctagtcacgtgatactgtcacgtgattgcgtcacgtgatgtagtcacgtgatggcgcgccatgcttcatcagactct

SEQ ID NO: 8409 - DNA, 172 bp, Artificial Sequence; identical to SEQ ID NO: 8408
  Synthetic polynucleotide

SEQ ID NO: 8410 - DNA, 191 bp, Artificial Sequence
  Synthetic polynucleotide
atcatctcaccttgcctcctgaacaagtcccgcgcatccctgcagggggtttgtttactttttagagggtttgtttacttttttcggggtttgtttactttttgacgggtttgtttactttttctagggtttgtttactttttactgggtttgtttacttttttgcggcgcgccatgcttcatcagactct

SEQ ID NO: 8411 - DNA, 191 bp, Artificial Sequence; identical to SEQ ID NO: 8410
  Synthetic polynucleotide

SEQ ID NO: 8412 - DNA, 190 bp, Artificial Sequence
  Synthetic polynucleotide
atcatctcaccttgcctcctgtctctgtctgggtgctacctgcaggcaaataacggtactagacaaataacggtacttcgcaaataacggtactgaccaaataacggtactctacaaataacggtactactcaaataacggtacttgccaaataacggtactgtaggcgcgccatgcttcatcagactct

SEQ ID NO: 8413 - DNA, 190 bp, Artificial Sequence; identical to SEQ ID NO: 8412
  Synthetic polynucleotide

SEQ ID NO: 8414 - DNA, 188 bp, Artificial Sequence
  Synthetic polynucleotide
atcatctcaccttgcctcctgacgaccatcttgtatggcctgcaggtttgtttacaatagatttgtttacaattcgtttgtttacaatgactttgtttacaatctatttgtttacaatacttttgtttacaattgctttgtttacaatgtatttgtttacaatggcgcgccatgcttcatcagactct

SEQ ID NO: 8415 - DNA, 188 bp, Artificial Sequence; identical to SEQ ID NO: 8414
  Synthetic polynucleotide

SEQ ID NO: 8416 - DNA, 172 bp, Artificial Sequence
  Synthetic polynucleotide
atcatctcaccttgcctcctgcatggcaattcaccctacctgcaggaggggcgtgtagaaggggcgtgttcgaggggcgtgtgacaggggcgtgtctaaggggcgtgtactaggggcgtgttgcaggggcgtgtgtaaggggcgtgtggcgcgccatgcttcatcagactct

SEQ ID NO: 8417 - DNA, 172 bp, Artificial Sequence; identical to SEQ ID NO: 8416
  Synthetic polynucleotide

SEQ ID NO: 8418 - DNA, 164 bp, Artificial Sequence
  Synthetic polynucleotide
atcatctcaccttgcctcctgaataacgagactcagttcctgcaggagtccaaagagaagtccaaagtcgagtccaaaggacagtccaaagctaagtccaaagactagtccaaagtgcagtccaaaggtaagtccaaagggcgcgccatgcttcatcagactct

SEQ ID NO: 8419 - DNA, 164 bp, Artificial Sequence; identical to SEQ ID NO: 8418
  Synthetic polynucleotide

SEQ ID NO: 8420 - DNA, 156 bp, Artificial Sequence
  Synthetic polynucleotide
atcatctcaccttgcctcctgagcgccaagtgtgtgtgcctgcaggtgtttataagatgtttatatcgtgtttatagactgtttatactatgtttataacttgtttatatgctgtttatagtatgtttataggcgcgccatgcttcatcagactct

SEQ ID NO: 8421 - DNA, 156 bp, Artificial Sequence; identical to SEQ ID NO: 8420
  Synthetic polynucleotide

SEQ ID NO: 8422 - DNA, 190 bp, Artificial Sequence
  Synthetic polynucleotide
atcatctcaccttgcctcctggaagtggtgtttactgacctgcaggagtttcggtttcgaagaagtttcggtttcgatcgagtttcggtttcgagacagtttcggtttcgactaagtttcggtttcgaactagtttcggtttcgatgcagtttcggtttcgagtaggcgcgccatgcttcatcagactct

SEQ ID NO: 8423 - DNA, 190 bp, Artificial Sequence; identical to SEQ ID NO: 8422
  Synthetic polynucleotide

SEQ ID NO: 8424 - DNA, 172 bp, Artificial Sequence
  Synthetic polynucleotide
atcatctcaccttgcctcctgctagctccttaatctcacctgcagggctaattaccagagctaattacctcggctaattaccgacgctaattaccctagctaattaccactgctaattacctgcgctaattaccgtagctaattaccggcgcgccatgcttcatcagactct

SEQ ID NO: 8425 - DNA, 172 bp, Artificial Sequence; identical to SEQ ID NO: 8424
  Synthetic polynucleotide

SEQ ID NO: 8426 - DNA, 172 bp, Artificial Sequence
  Synthetic polynucleotide
atcatctcaccttgcctcctgacgggaacagtttacggcctgcagggggatcgatcagagggatcgatctcggggatcgatcgacgggatcgatcctagggatcgatcactgggatcgatctgcgggatcgatcgtagggatcgatcggcgcgccatgcttcatcagactct

SEQ ID NO: 8427 - DNA, 172 bp, Artificial Sequence; identical to SEQ ID NO: 8426
  Synthetic polynucleotide

SEQ ID NO: 8428 - DNA, 185 bp, Artificial Sequence
  Synthetic polynucleotide
atcatctcaccttgcctcctgttccacccgccttaccacctgcaggcaatgcattgtgggtaagacaatgcattgtgggtatcgcaatgcattgtgggtagaccaatgcattgtgggtactacaatgcattgtgggtaactcaatgcattgtgggtatgcggcgcgccatgcttcatcagactct

SEQ ID NO: 8429 - DNA, 185 bp, Artificial Sequence; identical to SEQ ID NO: 8428
  Synthetic polynucleotide

SEQ ID NO: 8430 - DNA, 172 bp, Artificial Sequence
  Synthetic polynucleotide
atcatctcaccttgcctcctgtgtcaggacaagcactacctgcaggaaccaattaaagaaaccaattaatcgaaccaattaagacaaccaattaactaaaccaattaaactaaccaattaatgcaaccaattaagtaaaccaattaaggcgcgccatgcttcatcagactct

SEQ ID NO: 8431 - DNA, 172 bp, Artificial Sequence; identical to SEQ ID NO: 8430
  Synthetic polynucleotide

SEQ ID NO: 8432 - DNA, 156 bp, Artificial Sequence
  Synthetic polynucleotide
atcatctcaccttgcctcctgagtcggaggagggaaatcctgcagggcgcgaaaagagcgcgaaatcggcgcgaaagacgcgcgaaactagcgcgaaaactgcgcgaaatgcgcgcgaaagtagcgcgaaaggcgcgccatgcttcatcagactct

SEQ ID NO: 8433 - DNA, 156 bp, Artificial Sequence; identical to SEQ ID NO: 8432
  Synthetic polynucleotide

SEQ ID NO: 8434 - DNA, 190 bp, Artificial Sequence
  Synthetic polynucleotide
atcatctcaccttgcctcctgacggacacagtagcaaccctgcaggcgcccgaggcgcgtagacgcccgaggcgcgttcgcgcccgaggcgcgtgaccgcccgaggcgcgtctacgcccgaggcgcgtactcgcccgaggcgcgttgccgcccgaggcgcgtgtaggcgcgccatgcttcatcagactct

SEQ ID NO: 8435 - DNA, 190 bp, Artificial Sequence; identical to SEQ ID NO: 8434
  Synthetic polynucleotide

SEQ ID NO: 8436 - DNA, 191 bp, Artificial Sequence
  Synthetic polynucleotide
atcatctcaccttgcctcctgaaagtagaatcgctgggcctgcaggaaattgctgagtcagcatattagaaaattgctgagtcagcatatttcgaaattgctgagtcagcatattgacaaattgctgagtcagcatattctaaaattgctgagtcagcatattactggcgcgccatgcttcatcagactct

SEQ ID NO: 8437 - DNA, 191 bp, Artificial Sequence; identical to SEQ ID NO: 8436
  Synthetic polynucleotide

SEQ ID NO: 8438 - DNA, 191 bp, Artificial Sequence
  Synthetic polynucleotide
atcatctcaccttgcctcctgtgcaatttgacagggaccctgcaggaagagggattaattatcagaaagagggattaattatctcgaagagggattaattatcgacaagagggattaattatcctaaagagggattaattatcactaagagggattaattatctgcggcgcgccatgcttcatcagactct

SEQ ID NO: 8439 - DNA, 191 bp, Artificial Sequence; identical to SEQ ID NO: 8438
  Synthetic polynucleotide

SEQ ID NO: 8440 - DNA, 172 bp, Artificial Sequence
  Synthetic polynucleotide
atcatctcaccttgcctcctgggtatttcactgctctccctgcagggtcacgtgacagagtcacgtgactcggtcacgtgacgacgtcacgtgacctagtcacgtgacactgtcacgtgactgcgtcacgtgacgtagtcacgtgacggcgcgccatgcttcatcagactct

SEQ ID NO: 8441 - DNA, 172 bp, Artificial Sequence; identical to SEQ ID NO: 8440
  Synthetic polynucleotide

SEQ ID NO: 8442 - DNA, 191 bp, Artificial Sequence
  Synthetic polynucleotide
atcatctcaccttgcctcctgcaaatgtctcgcattaccctgcagggccacaggaagtgaggaagagccacaggaagtgaggatcggccacaggaagtgaggagacgccacaggaagtgaggactagccacaggaagtgaggaactgccacaggaagtgaggatgcggcgcgccatgcttcatcagactct

SEQ ID NO: 8443 - DNA, 191 bp, Artificial Sequence; identical to SEQ ID NO: 8442
  Synthetic polynucleotide

SEQ ID NO: 8444 - DNA, 156 bp, Artificial Sequence
  Synthetic polynucleotide
atcatctcaccttgcctcctgagtgttaaatggtctcccctgcagggcgtcagcagagcgtcagctcggcgtcagcgacgcgtcagcctagcgtcagcactgcgtcagctgcgcgtcagcgtagcgtcagcggcgcgccatgcttcatcagactct

SEQ ID NO: 8445 - DNA, 156 bp, Artificial Sequence; identical to SEQ ID NO: 8444
  Synthetic polynucleotide

SEQ ID NO: 8446 - DNA, 196 bp, Artificial Sequence
  Synthetic polynucleotide
atcatctcaccttgcctcctgacactcctggcgctaaacctgcaggataagtaggtcaaagaataagtaggtcaatcgataagtaggtcaagacataagtaggtcaactaataagtaggtcaaactataagtaggtcaatgcataagtaggtcaagtaataagtaggtcaaggcgcgccatgcttcatcagactct

SEQ ID NO: 8447 - DNA, 196 bp, Artificial Sequence; identical to SEQ ID NO: 8446
  Synthetic polynucleotide

SEQ ID NO: 8448 - DNA, 185 bp, Artificial Sequence
  Synthetic polynucleotide
atcatctcaccttgcctcctggtcttacggcgtaggagcctgcaggctggcgccccctggtgagactggcgccccctggtgtcgctggcgccccctggtggacctggcgccccctggtgctactggcgccccctggtgactctggcgccccctggtgtgcggcgcgccatgcttcatcagactct

SEQ ID NO: 8449 - DNA, 185 bp, Artificial Sequence; identical to SEQ ID NO: 8448
  Synthetic polynucleotide

SEQ ID NO: 8450 - DNA, 148 bp, Artificial Sequence
  Synthetic polynucleotide
atcatctcaccttgcctcctggggcttaactaatatctcctgcaggaaacaatagaaaacaattcgaaacaatgacaaacaatctaaaacaatactaaacaattgcaaacaatgtaaaacaatggcgcgccatgcttcatcagactct

SEQ ID NO: 8451 - DNA, 148 bp, Artificial Sequence; identical to SEQ ID NO: 8450
  Synthetic polynucleotide

SEQ ID NO: 8452 - DNA, 191 bp, Artificial Sequence
  Synthetic polynucleotide
atcatctcaccttgcctcctgcctgtaataaggctgatcctgcagggaaattttacgacctaaagagaaattttacgacctaatcggaaattttacgacctaagacgaaattttacgacctaactagaaattttacgacctaaactgaaattttacgacctaatgcggcgcgccatgcttcatcagactct

SEQ ID NO: 8453 - DNA, 191 bp, Artificial Sequence; identical to SEQ ID NO: 8452
  Synthetic polynucleotide

SEQ ID NO: 8454 - DNA, 188 bp, Artificial Sequence
  Synthetic polynucleotide
atcatctcaccttgcctcctggtgtatagaccttggtacctgcagggtgacgtcaacgagagtgacgtcaacgtcggtgacgtcaacggacgtgacgtcaacgctagtgacgtcaacgactgtgacgtcaacgtgcgtgacgtcaacggtagtgacgtcaacgggcgcgccatgcttcatcagactct

SEQ ID NO: 8455 - DNA, 188 bp, Artificial Sequence; identical to SEQ ID NO: 8454
  Synthetic polynucleotide

SEQ ID NO: 8456 - DNA, 180 bp, Artificial Sequence
  Synthetic polynucleotide
atcatctcaccttgcctcctgtggtcgactgtacgtcgcctgcaggggccataaaatagaggccataaaattcgggccataaaatgacggccataaaatctaggccataaaatactggccataaaattgcggccataaaatgtaggccataaaatggcgcgccatgcttcatcagactct

SEQ ID NO: 8457 - DNA, 180 bp, Artificial Sequence; identical to SEQ ID NO: 8456
  Synthetic polynucleotide

SEQ ID NO: 8458 - DNA, 185 bp, Artificial Sequence
  Synthetic polynucleotide
atcatctcaccttgcctcctggtccttccctagcctgtcctgcaggcaaacgtaaacaatccagacaaacgtaaacaatcctcgcaaacgtaaacaatccgaccaaacgtaaacaatccctacaaacgtaaacaatccactcaaacgtaaacaatcctgcggcgcgccatgcttcatcagactct

SEQ ID NO: 8459 - DNA, 185 bp, Artificial Sequence; identical to SEQ ID NO: 8458
  Synthetic polynucleotide

SEQ ID NO: 8460 - DNA, 172 bp, Artificial Sequence
  Synthetic polynucleotide
atcatctcaccttgcctcctgatctatctggtcagttacctgcaggatcgcgtgatagaatcgcgtgattcgatcgcgtgatgacatcgcgtgatctaatcgcgtgatactatcgcgtgattgcatcgcgtgatgtaatcgcgtgatggcgcgccatgcttcatcagactct

SEQ ID NO: 8461 - DNA, 172 bp, Artificial Sequence; identical to SEQ ID NO: 8460
  Synthetic polynucleotide

SEQ ID NO: 8462 - DNA, 197 bp, Artificial Sequence
  Synthetic polynucleotide
atcatctcaccttgcctcctgtttgcgcttgcgtcttgcctgcaggaaaaacacctgcgccagaaaaaacacctgcgcctcgaaaaacacctgcgccgacaaaaacacctgcgccctaaaaaacacctgcgccactaaaaacacctgcgcctgcaaaaacacctgcgccgtaggcgcgccatgcttcatcagactct

SEQ ID NO: 8463 - DNA, 197 bp, Artificial Sequence; identical to SEQ ID NO: 8462
  Synthetic polynucleotide

SEQ ID NO: 8464 - DNA, 197 bp, Artificial Sequence
  Synthetic polynucleotide
atcatctcaccttgcctcctgttccgggaagaattaagcctgcaggaaagggatgactcatagaaaagggatgactcattcgaaagggatgactcatgacaaagggatgactcatctaaaagggatgactcatactaaagggatgactcattgcaaagggatgactcatgtaggcgcgccatgcttcatcagactct

SEQ ID NO: 8465 - DNA, 197 bp, Artificial Sequence; identical to SEQ ID NO: 8464
  Synthetic polynucleotide

SEQ ID NO: 8466 - DNA, 197 bp, Artificial Sequence
  Synthetic polynucleotide
atcatctcaccttgcctcctgtcacccgaaagttgtaacctgcagggatgacgtcatcctcagagatgacgtcatcctctcggatgacgtcatcctcgacgatgacgtcatcctcctagatgacgtcatcctcactgatgacgtcatcctctgcgatgacgtcatcctcgtaggcgcgccatgcttcatcagactct

SEQ ID NO: 8467 - DNA, 197 bp, Artificial Sequence; identical to SEQ ID NO: 8466
  Synthetic polynucleotide

SEQ ID NO: 8468 - DNA, 180 bp, Artificial Sequence
  Synthetic polynucleotide
atcatctcaccttgcctcctgggcataaacgtgacggtcctgcaggaaatcgtgactagaaaatcgtgacttcgaaatcgtgactgacaaatcgtgactctaaaatcgtgactactaaatcgtgacttgcaaatcgtgactgtaaaatcgtgactggcgcgccatgcttcatcagactct

SEQ ID NO: 8469 - DNA, 180 bp, Artificial Sequence; identical to SEQ ID NO: 8468
  Synthetic polynucleotide

SEQ ID NO: 8470 - DNA, 188 bp, Artificial Sequence
  Synthetic polynucleotide
atcatctcaccttgcctcctgtggcgggtgattatatgcctgcaggtgacacgtggtaagatgacacgtggtatcgtgacacgtggtagactgacacgtggtactatgacacgtggtaacttgacacgtggtatgctgacacgtggtagtatgacacgtggtaggcgcgccatgcttcatcagactct

SEQ ID NO: 8471 - DNA, 188 bp, Artificial Sequence; identical to SEQ ID NO: 8470
  Synthetic polynucleotide

SEQ ID NO: 8472 - DNA, 185 bp, Artificial Sequence
  Synthetic polynucleotide
atcatctcaccttgcctcctgtgtaatgtctgcaaccccctgcaggctaccaataaaattctagactaccaataaaattcttcgctaccaataaaattctgacctaccaataaaattctctactaccaataaaattctactctaccaataaaattcttgcggcgcgccatgcttcatcagactct

SEQ ID NO: 8473 - DNA, 185 bp, Artificial Sequence; identical to SEQ ID NO: 8472
  Synthetic polynucleotide

SEQ ID NO: 8474 - DNA, 196 bp, Artificial Sequence
  Synthetic polynucleotide
atcatctcaccttgcctcctgacttcgatcaaatcatccctgcaggaaattgctgacgtagaaaattgctgacgttcgaaattgctgacgtgacaaattgctgacgtctaaaattgctgacgtactaaattgctgacgttgcaaattgctgacgtgtaaaattgctgacgtggcgcgccatgcttcatcagactct

SEQ ID NO: 8475 - DNA, 196 bp, Artificial Sequence; identical to SEQ ID NO: 8474
  Synthetic polynucleotide

SEQ ID NO: 8476 - DNA, 172 bp, Artificial Sequence
  Synthetic polynucleotide
atcatctcaccttgcctcctgcttaacaagcgattgcgcctgcaggccctagcaacagaccctagcaactcgccctagcaacgacccctagcaacctaccctagcaacactccctagcaactgcccctagcaacgtaccctagcaacggcgcgccatgcttcatcagactct

SEQ ID NO: 8477 - DNA, 172 bp, Artificial Sequence; identical to SEQ ID NO: 8476
  Synthetic polynucleotide

SEQ ID NO: 8478 - DNA, 172 bp, Artificial Sequence
  Synthetic polynucleotide
atcatctcaccttgcctcctgtaacgaactgccggtcccctgcaggaatcgatcgcagaaatcgatcgctcgaatcgatcgcgacaatcgatcgcctaaatcgatcgcactaatcgatcgctgcaatcgatcgcgtaaatcgatcgcggcgcgccatgcttcatcagactct

SEQ ID NO: 8479 - DNA, 172 bp, Artificial Sequence; identical to SEQ ID NO: 8478
  Synthetic polynucleotide

SEQ ID NO: 8480 - DNA, 197 bp, Artificial Sequence
  Synthetic polynucleotide
atcatctcaccttgcctcctgcaacctatgcgactcttcctgcagggagaaattaatataaagagagaaattaatataatcggagaaattaatataagacgagaaattaatataactagagaaattaatataaactgagaaattaatataatgcgagaaattaatataagtaggcgcgccatgcttcatcagactct

SEQ ID NO: 8481 - DNA, 197 bp, Artificial Sequence; identical to SEQ ID NO: 8480
  Synthetic polynucleotide

SEQ ID NO: 8482 - DNA, 185 bp, Artificial Sequence
  Synthetic polynucleotide
atcatctcaccttgcctcctgcttatgcactattatcgcctgcagggcgctgattggctgagagagcgctgattggctgagtcggcgctgattggctgaggacgcgctgattggctgagctagcgctgattggctgagactgcgctgattggctgagtgcggcgcgccatgcttcatcagactct

SEQ ID NO: 8483 - DNA, 185 bp, Artificial Sequence; identical to SEQ ID NO: 8482
  Synthetic polynucleotide

SEQ ID NO: 8484 - DNA, 190 bp, Artificial Sequence
  Synthetic polynucleotide
atcatctcaccttgcctcctgacccggttgtcttgacacctgcaggtgactgaacattcaagatgactgaacattcatcgtgactgaacattcagactgactgaacattcactatgactgaacattcaacttgactgaacattcatgctgactgaacattcagtaggcgcgccatgcttcatcagactct

SEQ ID NO: 8485 - DNA, 190 bp, Artificial Sequence; identical to SEQ ID NO: 8484
  Synthetic polynucleotide

SEQ ID NO: 8486 - DNA, 156 bp, Artificial Sequence
  Synthetic polynucleotide
atcatctcaccttgcctcctggggaaagttcgtcagaacctgcaggatgataccagaatgatacctcgatgataccgacatgataccctaatgataccactatgatacctgcatgataccgtaatgataccggcgcgccatgcttcatcagactct

SEQ ID NO: 8487 - DNA, 156 bp, Artificial Sequence; identical to SEQ ID NO: 8486
  Synthetic polynucleotide

SEQ ID NO: 8488 - DNA, 188 bp, Artificial Sequence
  Synthetic polynucleotide
atcatctcaccttgcctcctgatgcgcttccgcaacatcctgcaggtgttatgtaataagatgttatgtaatatcgtgttatgtaatagactgttatgtaatactatgttatgtaataacttgttatgtaatatgctgttatgtaatagtatgttatgtaataggcgcgccatgcttcatcagactct

SEQ ID NO: 8489 - DNA, 188 bp, Artificial Sequence; identical to SEQ ID NO: 8488
  Synthetic polynucleotide

SEQ ID NO: 8490 - DNA, 172 bp, Artificial Sequence
  Synthetic polynucleotide
atcatctcaccttgcctcctgatggaaatgttgtacggcctgcagggtcacgtgctagagtcacgtgcttcggtcacgtgctgacgtcacgtgctctagtcacgtgctactgtcacgtgcttgcgtcacgtgctgtagtcacgtgctggcgcgccatgcttcatcagactct

SEQ ID NO: 8491 - DNA, 172 bp, Artificial Sequence; identical to SEQ ID NO: 8490
  Synthetic polynucleotide

SEQ ID NO: 8492 - DNA, 191 bp, Artificial Sequence
  Synthetic polynucleotide
atcatctcaccttgcctcctgaaggccatgtcctatgacctgcaggtgaagggattaatcatcagatgaagggattaatcatctcgtgaagggattaatcatcgactgaagggattaatcatcctatgaagggattaatcatcacttgaagggattaatcatctgcggcgcgccatgcttcatcagactct

SEQ ID NO: 8493 - DNA, 191 bp, Artificial Sequence; identical to SEQ ID NO: 8492
  Synthetic polynucleotide

SEQ ID NO: 8494 - DNA, 172 bp, Artificial Sequence
  Synthetic polynucleotide
atcatctcaccttgcctcctgtccgtagatagcccactcctgcaggcgaatagggaagacgaatagggatcgcgaatagggagaccgaatagggactacgaatagggaactcgaatagggatgccgaatagggagtacgaatagggaggcgcgccatgcttcatcagactct

SEQ ID NO: 8495 - DNA, 172 bp, Artificial Sequence; identical to SEQ ID NO: 8494
  Synthetic polynucleotide

SEQ ID NO: 8496 - DNA, 197 bp, Artificial Sequence
  Synthetic polynucleotide
atcatctcaccttgcctcctgattctgaccctttacaacctgcaggcaaaatcgaaactaaagacaaaatcgaaactaatcgcaaaatcgaaactaagaccaaaatcgaaactaactacaaaatcgaaactaaactcaaaatcgaaactaatgccaaaatcgaaactaagtaggcgcgccatgcttcatcagactct

SEQ ID NO: 8497 - DNA, 197 bp, Artificial Sequence; identical to SEQ ID NO: 8496
  Synthetic polynucleotide

SEQ ID NO: 8498 - DNA, 196 bp, Artificial Sequence
  Synthetic polynucleotide
atcatctcaccttgcctcctgtcacttgtccaatgagtcctgcaggggggggcggggccagaggggggcggggcctcgggggggcggggccgacggggggcggggccctaggggggcggggccactggggggcggggcctgcggggggcggggccgtaggggggcggggccggcgcgccatgcttcatcagactct

SEQ ID NO: 8499 - DNA, 196 bp, Artificial Sequence; identical to SEQ ID NO: 8498
  Synthetic polynucleotide

SEQ ID NO: 8500 - DNA, 190 bp, Artificial Sequence
  Synthetic polynucleotide
atcatctcaccttgcctcctgcaggtgccgaccgtatacctgcaggaatgcgggggcggaagaaatgcgggggcggatcgaatgcgggggcggagacaatgcgggggcggactaaatgcgggggcggaactaatgcgggggcggatgcaatgcgggggcggagtaggcgcgccatgcttcatcagactct

SEQ ID NO: 8501 - DNA, 190 bp, Artificial Sequence; identical to SEQ ID NO: 8500
  Synthetic polynucleotide

SEQ ID NO: 8502 - DNA, 197 bp, Artificial Sequence
  Synthetic polynucleotide
atcatctcaccttgcctcctgggaggaccaattgctcccctgcaggtcgctgactcagcatagatcgctgactcagcattcgtcgctgactcagcatgactcgctgactcagcatctatcgctgactcagcatacttcgctgactcagcattgctcgctgactcagcatgtaggcgcgccatgcttcatcagactct

SEQ ID NO: 8503 - DNA, 197 bp, Artificial Sequence; identical to SEQ ID NO: 8502
  Synthetic polynucleotide

SEQ ID NO: 8504 - DNA, 148 bp, Artificial Sequence
  Synthetic polynucleotide
atcatctcaccttgcctcctgccctgccacttgtcatccctgcaggtgtcaaaagatgtcaaatcgtgtcaaagactgtcaaactatgtcaaaacttgtcaaatgctgtcaaagtatgtcaaaggcgcgccatgcttcatcagactct

SEQ ID NO: 8505 - DNA, 148 bp, Artificial Sequence; identical to SEQ ID NO: 8504
  Synthetic polynucleotide

SEQ ID NO: 8506 - DNA, 190 bp, Artificial Sequence
  Synthetic polynucleotide
atcatctcaccttgcctcctgaactgggctctgctcaacctgcaggactttcgctttcgtagaactttcgctttcgttcgactttcgctttcgtgacactttcgctttcgtctaactttcgctttcgtactactttcgctttcgttgcactttcgctttcgtgtaggcgcgccatgcttcatcagactct

SEQ ID NO: 8507 - DNA, 190 bp, Artificial Sequence; identical to SEQ ID NO: 8506
  Synthetic polynucleotide

SEQ ID NO: 8508 - DNA, 164 bp, Artificial Sequence
  Synthetic polynucleotide
atcatctcaccttgcctcctgctaggcaaggtacctaacctgcaggggtgacctaagaggtgacctatcgggtgacctagacggtgacctactaggtgacctaactggtgacctatgcggtgacctagtaggtgacctaggcgcgccatgcttcatcagactct

SEQ ID NO: 8509 - DNA, 164 bp, Artificial Sequence; identical to SEQ ID NO: 8508
  Synthetic polynucleotide

SEQ ID NO: 8510 - DNA, 172 bp, Artificial Sequence
  Synthetic polynucleotide
atcatctcaccttgcctcctgcgcataggagttacattcctgcaggagtcagcaaaagaagtcagcaaatcgagtcagcaaagacagtcagcaaactaagtcagcaaaactagtcagcaaatgcagtcagcaaagtaagtcagcaaaggcgcgccatgcttcatcagactct

SEQ ID NO: 8511 - DNA, 172 bp, Artificial Sequence; identical to SEQ ID NO: 8510
  Synthetic polynucleotide

SEQ ID NO: 8512 - DNA, 197 bp, Artificial Sequence
  Synthetic polynucleotide
atcatctcaccttgcctcctgagggcgagctttggagtcctgcaggttacttccgggtcctagattacttccgggtccttcgttacttccgggtcctgacttacttccgggtcctctattacttccgggtcctactttacttccgggtccttgcttacttccgggtcctgtaggcgcgccatgcttcatcagactct

SEQ ID NO: 8513 - DNA, 197 bp, Artificial Sequence; identical to SEQ ID NO: 8512
  Synthetic polynucleotide

SEQ ID NO: 8514 - DNA, 197 bp, Artificial Sequence
  Synthetic polynucleotide
atcatctcaccttgcctcctgacactgcagttgatgaccctgcaggggccaccagggggcgctaagaggccaccagggggcgctatcgggccaccagggggcgctagacggccaccagggggcgctactaggccaccagggggcgctaactggccaccagggggcgctatgcggcgcgccatgcttcatcagactct

SEQ ID NO: 8515 - DNA, 197 bp, Artificial Sequence; identical to SEQ ID NO: 8514
  Synthetic polynucleotide

SEQ ID NO: 8516 - DNA, 172 bp, Artificial Sequence
  Synthetic polynucleotide
atcatctcaccttgcctcctgagtctcgcagatcaccgcctgcaggtggcgcaaaaagatggcgcaaaatcgtggcgcaaaagactggcgcaaaactatggcgcaaaaacttggcgcaaaatgctggcgcaaaagtatggcgcaaaaggcgcgccatgcttcatcagactct

SEQ ID NO: 8517 - DNA, 172 bp, Artificial Sequence; identical to SEQ ID NO: 8516
  Synthetic polynucleotide

SEQ ID NO: 8518 - DNA, 172 bp, Artificial Sequence
  Synthetic polynucleotide
atcatctcaccttgcctcctgcggctctattggcctttcctgcaggatataaggttagaatataaggtttcgatataaggttgacatataaggttctaatataaggttactatataaggtttgcatataaggttgtaatataaggttggcgcgccatgcttcatcagactct

SEQ ID NO: 8519 - DNA, 172 bp, Artificial Sequence; identical to SEQ ID NO: 8518
  Synthetic polynucleotide

SEQ ID NO: 8520 - DNA, 191 bp, Artificial Sequence
  Synthetic polynucleotide
atcatctcaccttgcctcctgtttccgaacactggtatcctgcagggaattaattaattaattagagaattaattaattaatttcggaattaattaattaattgacgaattaattaattaattctagaattaattaattaattactgaattaattaattaatttgcggcgcgccatgcttcatcagactct

SEQ ID NO: 8521 - DNA, 191 bp, Artificial Sequence; identical to SEQ ID NO: 8520
  Synthetic polynucleotide

SEQ ID NO: 8522 - DNA, 180 bp, Artificial Sequence
  Synthetic polynucleotide
atcatctcaccttgcctcctgaaacgctgtagtaagaacctgcagggtggggggtctagagtggggggtcttcggtggggggtctgacgtggggggtctctagtggggggtctactgtggggggtcttgcgtggggggtctgtagtggggggtctggcgcgccatgcttcatcagactct

SEQ ID NO: 8523 - DNA, 180 bp, Artificial Sequence; identical to SEQ ID NO: 8522
  Synthetic polynucleotide

SEQ ID NO: 8524 - DNA, 172 bp, Artificial Sequence
  Synthetic polynucleotide
atcatctcaccttgcctcctgtccaatgatgtccgcctcctgcagggtcacgtgccagagtcacgtgcctcggtcacgtgccgacgtcacgtgccctagtcacgtgccactgtcacgtgcctgcgtcacgtgccgtagtcacgtgccggcgcgccatgcttcatcagactct

SEQ ID NO: 8525 - DNA, 172 bp, Artificial Sequence; identical to SEQ ID NO: 8524
  Synthetic polynucleotide

SEQ ID NO: 8526 - DNA, 172 bp, Artificial Sequence
  Synthetic polynucleotide
atcatctcaccttgcctcctgacctcacaaacgtgctacctgcagggctaattaacagagctaattaactcggctaattaacgacgctaattaacctagctaattaacactgctaattaactgcgctaattaacgtagctaattaacggcgcgccatgcttcatcagactct

SEQ ID NO: 8527 - DNA, 172 bp, Artificial Sequence; identical to SEQ ID NO: 8526
  Synthetic polynucleotide

SEQ ID NO: 8528 - DNA, 183 bp, Artificial Sequence
  Synthetic polynucleotide
atcatctcaccttgcctcctgcattgataatactgggacctgcaggtccagtggttgggcgaccatctgttagatccagtggttgggcgaccatctgtttcgtccagtggttgggcgaccatctgttgactccagtggttgggcgaccatctgttctaggcgcgccatgcttcatcagactct

SEQ ID NO: 8529 - DNA, 183 bp, Artificial Sequence; identical to SEQ ID NO: 8528
  Synthetic polynucleotide

SEQ ID NO: 8530 - DNA, 191 bp, Artificial Sequence
  Synthetic polynucleotide
atcatctcaccttgcctcctgagtgctgttcttgtcgacctgcaggataggacacgtcatcatagaataggacacgtcatcattcgataggacacgtcatcatgacataggacacgtcatcatctaataggacacgtcatcatactataggacacgtcatcattgcggcgcgccatgcttcatcagactct

SEQ ID NO: 8531 - DNA, 191 bp, Artificial Sequence; identical to SEQ ID NO: 8530
  Synthetic polynucleotide

SEQ ID NO: 8532 - DNA, 172 bp, Artificial Sequence
  Synthetic polynucleotide
atcatctcaccttgcctcctggagaattgtacacctgacctgcagggctaattaagagagctaattaagtcggctaattaaggacgctaattaagctagctaattaagactgctaattaagtgcgctaattaaggtagctaattaagggcgcgccatgcttcatcagactct

SEQ ID NO: 8533 - DNA, 172 bp, Artificial Sequence; identical to SEQ ID NO: 8532
  Synthetic polynucleotide

SEQ ID NO: 8534 - DNA, 196 bp, Artificial Sequence
  Synthetic polynucleotide
atcatctcaccttgcctcctggcgccaagcataggtgtcctgcaggaataagtatataaagaaataagtatataatcgaataagtatataagacaataagtatataactaaataagtatataaactaataagtatataatgcaataagtatataagtaaataagtatataaggcgcgccatgcttcatcagactct

SEQ ID NO: 8535 - DNA, 196 bp, Artificial Sequence; identical to SEQ ID NO: 8534
  Synthetic polynucleotide

SEQ ID NO: 8536 - DNA, 191 bp, Artificial Sequence
  Synthetic polynucleotide
atcatctcaccttgcctcctggtatgggtaagatcttccctgcaggcgcacaagaacacaatgtaccctcccgagacgcacaagaacacaatgtaccctcccgtcgcgcacaagaacacaatgtaccctcccggaccgcacaagaacacaatgtaccctcccgctaggcgcgccatgcttcatcagactct

SEQ ID NO: 8537 - DNA, 191 bp, Artificial Sequence; identical to SEQ ID NO: 8536
  Synthetic polynucleotide

SEQ ID NO: 8538 - DNA, 156 bp, Artificial Sequence
  Synthetic polynucleotide
atcatctcaccttgcctcctggaaaggttataactcgtcctgcaggtcaatgaaagatcaatgaatcgtcaatgaagactcaatgaactatcaatgaaacttcaatgaatgctcaatgaagtatcaatgaaggcgcgccatgcttcatcagactct

SEQ ID NO: 8539 - DNA, 156 bp, Artificial Sequence; identical to SEQ ID NO: 8538
  Synthetic polynucleotide

SEQ ID NO: 8540 - DNA, 191 bp, Artificial Sequence
  Synthetic polynucleotide
atcatctcaccttgcctcctgtagaggaggaggagattcctgcaggaatgaattgcagtcattagaaatgaattgcagtcatttcgaatgaattgcagtcattgacaatgaattgcagtcattctaaatgaattgcagtcattactaatgaattgcagtcatttgcggcgcgccatgcttcatcagactct

SEQ ID NO: 8541 - DNA, 191 bp, Artificial Sequence; identical to SEQ ID NO: 8540
  Synthetic polynucleotide

SEQ ID NO: 8542 - DNA, 198 bp, Artificial Sequence
  Synthetic polynucleotide
atcatctcaccttgcctcctgcccgaggtactttcgtacctgcaggcctcctccaggaagccctccgggagacctcctccaggaagccctccgggtcgcctcctccaggaagccctccggggaccctcctccaggaagccctccgggctacctcctccaggaagccctccgggggcgcgccatgcttcatcagactct

SEQ ID NO: 8543 - DNA, 198 bp, Artificial Sequence; identical to SEQ ID NO: 8542
  Synthetic polynucleotide

SEQ ID NO: 8544 - DNA, 186 bp, Artificial Sequence
  Synthetic polynucleotide
atcatctcaccttgcctcctgactaacctaacgagatgcctgcagggtgacctctgggtgacccccagagtgacctctgggtgaccccctcggtgacctctgggtgacccccgacgtgacctctgggtgacccccctagtgacctctgggtgacccccactggcgcgccatgcttcatcagactct

SEQ ID NO: 8545 - DNA, 186 bp, Artificial Sequence; identical to SEQ ID NO: 8544
  Synthetic polynucleotide

SEQ ID NO: 8546 - DNA, 197 bp, Artificial Sequence
  Synthetic polynucleotide
atcatctcaccttgcctcctggttctccataacaaggacctgcaggagtgttaacagaacacctagaagtgttaacagaacaccttcgagtgttaacagaacacctgacagtgttaacagaacacctctaagtgttaacagaacacctactagtgttaacagaacaccttgcggcgcgccatgcttcatcagactct

SEQ ID NO: 8547 - DNA, 197 bp, Artificial Sequence; identical to SEQ ID NO: 8546
  Synthetic polynucleotide

SEQ ID NO: 8548 - DNA, 156 bp, Artificial Sequence
  Synthetic polynucleotide
atcatctcaccttgcctcctgaaatgcggagacctaaccctgcaggcatttccgagacatttccgtcgcatttccggaccatttccgctacatttccgactcatttccgtgccatttccggtacatttccgggcgcgccatgcttcatcagactct

SEQ ID NO: 8549 - DNA, 156 bp, Artificial Sequence; identical to SEQ ID NO: 8548
  Synthetic polynucleotide

SEQ ID NO: 8550 - DNA, 190 bp, Artificial Sequence
  Synthetic polynucleotide
atcatctcaccttgcctcctgtccggtagagctacaagcctgcaggacattgcataattaagaacattgcataattatcgacattgcataattagacacattgcataattactaacattgcataattaactacattgcataattatgcacattgcataattagtaggcgcgccatgcttcatcagactct

SEQ ID NO: 8551 - DNA, 190 bp, Artificial Sequence; identical to SEQ ID NO: 8550
  Synthetic polynucleotide

SEQ ID NO: 8552 - DNA, 197 bp, Artificial Sequence
  Synthetic polynucleotide
atcatctcaccttgcctcctgacggttccgtgggttaccctgcaggattgtcatgctaatgagaattgtcatgctaatgtcgattgtcatgctaatggacattgtcatgctaatgctaattgtcatgctaatgactattgtcatgctaatgtgcattgtcatgctaatggtaggcgcgccatgcttcatcagactct

SEQ ID NO: 8553 - DNA, 197 bp, Artificial Sequence; identical to SEQ ID NO: 8552
  Synthetic polynucleotide

SEQ ID NO: 8554 - DNA, 172 bp, Artificial Sequence
  Synthetic polynucleotide
atcatctcaccttgcctcctggttcggagtctatggttcctgcaggtcttaatgacagatcttaatgactcgtcttaatgacgactcttaatgacctatcttaatgacacttcttaatgactgctcttaatgacgtatcttaatgacggcgcgccatgcttcatcagactct

SEQ ID NO: 8555 - DNA, 172 bp, Artificial Sequence; identical to SEQ ID NO: 8554
  Synthetic polynucleotide

SEQ ID NO: 8556 - DNA, 164 bp, Artificial Sequence
  Synthetic polynucleotide
atcatctcaccttgcctcctgccatagtctaggtcaaccctgcagggacaggtgtagagacaggtgttcggacaggtgtgacgacaggtgtctagacaggtgtactgacaggtgttgcgacaggtgtgtagacaggtgtggcgcgccatgcttcatcagactct

SEQ ID NO: 8557 - DNA, 164 bp, Artificial Sequence; identical to SEQ ID NO: 8556
  Synthetic polynucleotide

SEQ ID NO: 8558 - DNA, 180 bp, Artificial Sequence
  Synthetic polynucleotide
atcatctcaccttgcctcctgatgcgtgggattcttgccctgcagggccggcccctcagagccggcccctctcggccggcccctcgacgccggcccctcctagccggcccctcactgccggcccctctgcgccggcccctcgtagccggcccctcggcgcgccatgcttcatcagactct

SEQ ID NO: 8559 - DNA, 180 bp, Artificial Sequence; identical to SEQ ID NO: 8558
  Synthetic polynucleotide

SEQ ID NO: 8560 - DNA, 188 bp, Artificial Sequence
  Synthetic polynucleotide
atcatctcaccttgcctcctgtatattggcaccctgggcctgcaggtaattgcaatcaagataattgcaatcatcgtaattgcaatcagactaattgcaatcactataattgcaatcaacttaattgcaatcatgctaattgcaatcagtataattgcaatcaggcgcgccatgcttcatcagactct

SEQ ID NO: 8561 - DNA, 188 bp, Artificial Sequence; identical to SEQ ID NO: 8560
  Synthetic polynucleotide

SEQ ID NO: 8562 - DNA, 197 bp, Artificial Sequence
  Synthetic polynucleotide
atcatctcaccttgcctcctggcaatgacatagttgcccctgcaggtaccatagcaacggtagataccatagcaacggttcgtaccatagcaacggtgactaccatagcaacggtctataccatagcaacggtacttaccatagcaacggttgctaccatagcaacggtgtaggcgcgccatgcttcatcagactct

SEQ ID NO: 8563 - DNA, 197 bp, Artificial Sequence; identical to SEQ ID NO: 8562
  Synthetic polynucleotide

SEQ ID NO: 8564 - DNA, 180 bp, Artificial Sequence
  Synthetic polynucleotide
atcatctcaccttgcctcctgcggaaggaaacatgtaccctgcaggcgtgagtcatcagacgtgagtcatctcgcgtgagtcatcgaccgtgagtcatcctacgtgagtcatcactcgtgagtcatctgccgtgagtcatcgtacgtgagtcatcggcgcgccatgcttcatcagactct

SEQ ID NO: 8565 - DNA, 180 bp, Artificial Sequence; identical to SEQ ID NO: 8564
  Synthetic polynucleotide

SEQ ID NO: 8566 - DNA, 190 bp, Artificial Sequence
  Synthetic polynucleotide
atcatctcaccttgcctcctgcagcaagtacagggctgcctgcaggatatcacgtgatttagaatatcacgtgattttcgatatcacgtgatttgacatatcacgtgatttctaatatcacgtgatttactatatcacgtgattttgcatatcacgtgatttgtaggcgcgccatgcttcatcagactct

SEQ ID NO: 8567 - DNA, 190 bp, Artificial Sequence; identical to SEQ ID NO: 8566
  Synthetic polynucleotide

SEQ ID NO: 8568 - DNA, 164 bp, Artificial Sequence
  Synthetic polynucleotide
atcatctcaccttgcctcctgacaactagtgcgttggtcctgcagggggggagggagagggggagggtcggggggaggggacgggggagggctagggggagggactgggggagggtgcgggggaggggtagggggagggggcgcgccatgcttcatcagactct

SEQ ID NO: 8569 - DNA, 164 bp, Artificial Sequence; identical to SEQ ID NO: 8568
  Synthetic polynucleotide

SEQ ID NO: 8570 - DNA, 164 bp, Artificial Sequence
  Synthetic polynucleotide
atcatctcaccttgcctcctgtcgtacaacgtgcagctcctgcaggctaattaacagactaattaactcgctaattaacgacctaattaacctactaattaacactctaattaactgcctaattaacgtactaattaacggcgcgccatgcttcatcagactct

SEQ ID NO: 8571 - DNA, 164 bp, Artificial Sequence; identical to SEQ ID NO: 8570
  Synthetic polynucleotide

SEQ ID NO: 8572 - DNA, 191 bp, Artificial Sequence
  Synthetic polynucleotide
atcatctcaccttgcctcctggcactagaccggccattcctgcagggttcaaaaatggtgttcagagttcaaaaatggtgttctcggttcaaaaatggtgttcgacgttcaaaaatggtgttcctagttcaaaaatggtgttcactgttcaaaaatggtgttctgcggcgcgccatgcttcatcagactct

SEQ ID NO: 8573 - DNA, 191 bp, Artificial Sequence; identical to SEQ ID NO: 8572
  Synthetic polynucleotide

SEQ ID NO: 8574 - DNA, 164 bp, Artificial Sequence
  Synthetic polynucleotide
atcatctcaccttgcctcctgcgaacggtcttgtgtcacctgcaggcccacgcatagacccacgcattcgcccacgcatgaccccacgcatctacccacgcatactcccacgcattgccccacgcatgtacccacgcatggcgcgccatgcttcatcagactct

SEQ ID NO: 8575 - DNA, 164 bp, Artificial Sequence; identical to SEQ ID NO: 8574
  Synthetic polynucleotide

SEQ ID NO: 8576 - DNA, 164 bp, Artificial Sequence
  Synthetic polynucleotide
atcatctcaccttgcctcctgaccttgaacgcgttcggcctgcaggctaattaaaagactaattaaatcgctaattaaagacctaattaaactactaattaaaactctaattaaatgcctaattaaagtactaattaaaggcgcgccatgcttcatcagactct

SEQ ID NO: 8577 - DNA, 164 bp, Artificial Sequence; identical to SEQ ID NO: 8576
  Synthetic polynucleotide

SEQ ID NO: 8578 - DNA, 164 bp, Artificial Sequence
  Synthetic polynucleotide
atcatctcaccttgcctcctgaccacactttggctcatcctgcaggctaattaagagactaattaagtcgctaattaaggacctaattaagctactaattaagactctaattaagtgcctaattaaggtactaattaagggcgcgccatgcttcatcagactct

SEQ ID NO: 8579 - DNA, 164 bp, Artificial Sequence; identical to SEQ ID NO: 8578
  Synthetic polynucleotide

SEQ ID NO: 8580 - DNA, 172 bp, Artificial Sequence
  Synthetic polynucleotide
atcatctcaccttgcctcctgctacgcctactagctagcctgcaggctaattgcttagactaattgctttcgctaattgcttgacctaattgcttctactaattgcttactctaattgctttgcctaattgcttgtactaattgcttggcgcgccatgcttcatcagactct

SEQ ID NO: 8581 - DNA, 172 bp, Artificial Sequence; identical to SEQ ID NO: 8580
  Synthetic polynucleotide

SEQ ID NO: 8582 - DNA, 172 bp, Artificial Sequence
  Synthetic polynucleotide
atcatctcaccttgcctcctgtacctccaatcgcgcgacctgcagggctgatgcaaagagctgatgcaatcggctgatgcaagacgctgatgcaactagctgatgcaaactgctgatgcaatgcgctgatgcaagtagctgatgcaaggcgcgccatgcttcatcagactct

SEQ ID NO: 8583 - DNA, 172 bp, Artificial Sequence; identical to SEQ ID NO: 8582
  Synthetic polynucleotide

SEQ ID NO: 8584 - DNA, 188 bp, Artificial Sequence
  Synthetic polynucleotide
atcatctcaccttgcctcctgttaccctgcctaatggccctgcaggggatgtttgtttagaggatgtttgttttcgggatgtttgtttgacggatgtttgtttctaggatgtttgtttactggatgtttgttttgcggatgtttgtttgtaggatgtttgtttggcgcgccatgcttcatcagactct

SEQ ID NO: 8585 - DNA, 188 bp, Artificial Sequence; identical to SEQ ID NO: 8584
  Synthetic polynucleotide

SEQ ID NO: 8586 - DNA, 188 bp, Artificial Sequence
  Synthetic polynucleotide
atcatctcaccttgcctcctgtcgatggtaccgtactgcctgcaggaacagctgacgcagaaacagctgacgctcgaacagctgacgcgacaacagctgacgcctaaacagctgacgcactaacagctgacgctgcaacagctgacgcgtaaacagctgacgcggcgcgccatgcttcatcagactct

SEQ ID NO: 8587 - DNA, 188 bp, Artificial Sequence; identical to SEQ ID NO: 8586
  Synthetic polynucleotide

SEQ ID NO: 8588 - DNA, 185 bp, Artificial Sequence
  Synthetic polynucleotide
atcatctcaccttgcctcctgtcccgattagcgtcattcctgcaggttttacagtagcaaaaagattttacagtagcaaaatcgttttacagtagcaaaagacttttacagtagcaaaactattttacagtagcaaaaactttttacagtagcaaaatgcggcgcgccatgcttcatcagactct

SEQ ID NO: 8589 - DNA, 185 bp, Artificial Sequence; identical to SEQ ID NO: 8588
  Synthetic polynucleotide

SEQ ID NO: 8590 - DNA, 172 bp, Artificial Sequence
  Synthetic polynucleotide
atcatctcaccttgcctcctggtcggagttgataaattcctgcaggcgcccgaggcagacgcccgaggctcgcgcccgaggcgaccgcccgaggcctacgcccgaggcactcgcccgaggctgccgcccgaggcgtacgcccgaggcggcgcgccatgcttcatcagactct

SEQ ID NO: 8591 - DNA, 172 bp, Artificial Sequence; identical to SEQ ID NO: 8590
  Synthetic polynucleotide

SEQ ID NO: 8592 - DNA, 156 bp, Artificial Sequence
  Synthetic polynucleotide
atcatctcaccttgcctcctgctttaaacgcttacgagcctgcaggttctgttgagattctgttgtcgttctgttggacttctgttgctattctgttgactttctgttgtgcttctgttggtattctgttgggcgcgccatgcttcatcagactct

SEQ ID NO: 8593 - DNA, 156 bp, Artificial Sequence; identical to SEQ ID NO: 8592
  Synthetic polynucleotide

SEQ ID NO: 8594 - DNA, 197 bp, Artificial Sequence
  Synthetic polynucleotide
atcatctcaccttgcctcctgatagcactagccatcaccctgcaggattggttatattggttaaagaattggttatattggttaatcgattggttatattggttaagacattggttatattggttaactaattggttatattggttaaactattggttatattggttaatgcggcgcgccatgcttcatcagactct

SEQ ID NO: 8595 - DNA, 197 bp, Artificial Sequence; identical to SEQ ID NO: 8594
  Synthetic polynucleotide

SEQ ID NO: 8596 - DNA, 164 bp, Artificial Sequence
  Synthetic polynucleotide
atcatctcaccttgcctcctgcactatcgcgatgcgtccctgcaggggccatgtgagaggccatgtgtcgggccatgtggacggccatgtgctaggccatgtgactggccatgtgtgcggccatgtggtaggccatgtgggcgcgccatgcttcatcagactct

SEQ ID NO: 8597 - DNA, 164 bp, Artificial Sequence; identical to SEQ ID NO: 8596
  Synthetic polynucleotide

SEQ ID NO: 8598 - DNA, 156 bp, Artificial Sequence
  Synthetic polynucleotide
atcatctcaccttgcctcctggttcttaccagatccaccctgcaggcacgtggcagacacgtggctcgcacgtggcgaccacgtggcctacacgtggcactcacgtggctgccacgtggcgtacacgtggcggcgcgccatgcttcatcagactct

SEQ ID NO: 8599 - DNA, 156 bp, Artificial Sequence; identical to SEQ ID NO: 8598
  Synthetic polynucleotide

SEQ ID NO: 8600 - DNA, 185 bp, Artificial Sequence
  Synthetic polynucleotide
atcatctcaccttgcctcctgatacgccttatgtacggcctgcaggcaaaaccaattaatttagacaaaaccaattaattttcgcaaaaccaattaatttgaccaaaaccaattaatttctacaaaaccaattaatttactcaaaaccaattaattttgcggcgcgccatgcttcatcagactct

SEQ ID NO: 8601 - DNA, 185 bp, Artificial Sequence; identical to SEQ ID NO: 8600
  Synthetic polynucleotide

SEQ ID NO: 8602 - DNA, 172 bp, Artificial Sequence
  Synthetic polynucleotide
atcatctcaccttgcctcctgaagctccagaaggtccacctgcaggggttgctatgagaggttgctatgtcgggttgctatggacggttgctatgctaggttgctatgactggttgctatgtgcggttgctatggtaggttgctatgggcgcgccatgcttcatcagactct

SEQ ID NO: 8603 - DNA, 172 bp, Artificial Sequence; identical to SEQ ID NO: 8602
  Synthetic polynucleotide

SEQ ID NO: 8604 - DNA, 197 bp, Artificial Sequence
  Synthetic polynucleotide
atcatctcaccttgcctcctgttgctaggacagcccaccctgcaggcaaaaaggggcgtggcatagacaaaaaggggcgtggcattcgcaaaaaggggcgtggcatgaccaaaaaggggcgtggcatctacaaaaaggggcgtggcatactcaaaaaggggcgtggcattgcggcgcgccatgcttcatcagactct

SEQ ID NO: 8605 - DNA, 197 bp, Artificial Sequence; identical to SEQ ID NO: 8604
  Synthetic polynucleotide

SEQ ID NO: 8606 - DNA, 180 bp, Artificial Sequence
  Synthetic polynucleotide
atcatctcaccttgcctcctgcccaggttggataaggtcctgcaggcttgagtggctagacttgagtggcttcgcttgagtggctgaccttgagtggctctacttgagtggctactcttgagtggcttgccttgagtggctgtacttgagtggctggcgcgccatgcttcatcagactct

SEQ ID NO: 8607 - DNA, 180 bp, Artificial Sequence; identical to SEQ ID NO: 8606
  Synthetic polynucleotide

SEQ ID NO: 8608 - DNA, 190 bp, Artificial Sequence
  Synthetic polynucleotide
atcatctcaccttgcctcctgtgtaattcgggtgacttcctgcaggccacaggcaggtgcagaccacaggcaggtgctcgccacaggcaggtgcgacccacaggcaggtgcctaccacaggcaggtgcactccacaggcaggtgctgcccacaggcaggtgcgtaggcgcgccatgcttcatcagactct

SEQ ID NO: 8609 - DNA, 190 bp, Artificial Sequence; identical to SEQ ID NO: 8608
  Synthetic polynucleotide

SEQ ID NO: 8610 - DNA, 179 bp, Artificial Sequence
  Synthetic polynucleotide
atcatctcaccttgcctcctgcgatcccggtagtattccctgcaggaggtagagaattaggtgataaaaaagaaggtagagaattaggtgataaaaatcgaggtagagaattaggtgataaaaagacaggtagagaattaggtgataaaaactaggcgcgccatgcttcatcagactct

SEQ ID NO: 8611 - DNA, 179 bp, Artificial Sequence; identical to SEQ ID NO: 8610
  Synthetic polynucleotide

SEQ ID NO: 8612 - DNA, 190 bp, Artificial Sequence
  Synthetic polynucleotide
atcatctcaccttgcctcctggaaggtcatctttggatcctgcaggtttccccacacgacagatttccccacacgactcgtttccccacacgacgactttccccacacgacctatttccccacacgacacttttccccacacgactgctttccccacacgacgtaggcgcgccatgcttcatcagactct

SEQ ID NO: 8613 - DNA, 190 bp, Artificial Sequence; identical to SEQ ID NO: 8612
  Synthetic polynucleotide

SEQ ID NO: 8614 - DNA, 156 bp, Artificial Sequence
  Synthetic polynucleotide
atcatctcaccttgcctcctgcccatgtaatatatctccctgcaggcacgtggtagacacgtggttcgcacgtggtgaccacgtggtctacacgtggtactcacgtggttgccacgtggtgtacacgtggtggcgcgccatgcttcatcagactct

SEQ ID NO: 8615 - DNA, 156 bp, Artificial Sequence; identical to SEQ ID NO: 8614
  Synthetic polynucleotide

SEQ ID NO: 8616 - DNA, 172 bp, Artificial Sequence
  Synthetic polynucleotide
atcatctcaccttgcctcctgaagtagtgatgtccttacctgcaggacccggatgtagaacccggatgttcgacccggatgtgacacccggatgtctaacccggatgtactacccggatgttgcacccggatgtgtaacccggatgtggcgcgccatgcttcatcagactct

SEQ ID NO: 8617 - DNA, 172 bp, Artificial Sequence; identical to SEQ ID NO: 8616
  Synthetic polynucleotide

SEQ ID NO: 8618 - DNA, 191 bp, Artificial Sequence
  Synthetic polynucleotide
atcatctcaccttgcctcctgtatgctccgggcagaaccctgcaggggggcacgtgtcggctgagaggggcacgtgtcggctgtcgggggcacgtgtcggctggacggggcacgtgtcggctgctaggggcacgtgtcggctgactggggcacgtgtcggctgtgcggcgcgccatgcttcatcagactct

SEQ ID NO: 8619 - DNA, 191 bp, Artificial Sequence; identical to SEQ ID NO: 8618
  Synthetic polynucleotide

SEQ ID NO: 8620 - DNA, 197 bp, Artificial Sequence
  Synthetic polynucleotide
atcatctcaccttgcctcctgagtaccttcgtatcatgcctgcagggcagccaagcgtgacagagcagccaagcgtgactcggcagccaagcgtgacgacgcagccaagcgtgacctagcagccaagcgtgacactgcagccaagcgtgactgcgcagccaagcgtgacgtaggcgcgccatgcttcatcagactct

SEQ ID NO: 8621 - DNA, 197 bp, Artificial Sequence; identical to SEQ ID NO: 8620
  Synthetic polynucleotide

SEQ ID NO: 8622 - DNA, 183 bp, Artificial Sequence
  Synthetic polynucleotide
atcatctcaccttgcctcctggcaagcagtcgacacttcctgcaggtaaccaatataaccaattaataaccagataaccaatataaccaattaataacctcgtaaccaatataaccaattaataaccgactaaccaatataaccaattaataaccctaggcgcgccatgcttcatcagactct

SEQ ID NO: 8623 - DNA, 183 bp, Artificial Sequence; identical to SEQ ID NO: 8622
  Synthetic polynucleotide

SEQ ID NO: 8624 - DNA, 180 bp, Artificial Sequence
  Synthetic polynucleotide
atcatctcaccttgcctcctgtcttagtcagggaagtacctgcaggaccacgtggtcagaaccacgtggtctcgaccacgtggtcgacaccacgtggtcctaaccacgtggtcactaccacgtggtctgcaccacgtggtcgtaaccacgtggtcggcgcgccatgcttcatcagactct

SEQ ID NO: 8625 - DNA, 180 bp, Artificial Sequence; identical to SEQ ID NO: 8624
  Synthetic polynucleotide

SEQ ID NO: 8626 - DNA, 185 bp, Artificial Sequence
  Synthetic polynucleotide
atcatctcaccttgcctcctgtccgcgttaaatctacacctgcagggtcaattaattaatcaagagtcaattaattaatcatcggtcaattaattaatcagacgtcaattaattaatcactagtcaattaattaatcaactgtcaattaattaatcatgcggcgcgccatgcttcatcagactct

SEQ ID NO: 8627 - DNA, 185 bp, Artificial Sequence; identical to SEQ ID NO: 8626
  Synthetic polynucleotide

SEQ ID NO: 8628 - DNA, 172 bp, Artificial Sequence
  Synthetic polynucleotide
atcatctcaccttgcctcctgctatggacctagaggaccctgcaggttcctgctaaagattcctgctaatcgttcctgctaagacttcctgctaactattcctgctaaactttcctgctaatgcttcctgctaagtattcctgctaaggcgcgccatgcttcatcagactct

SEQ ID NO: 8629 - DNA, 172 bp, Artificial Sequence; identical to SEQ ID NO: 8628
  Synthetic polynucleotide

SEQ ID NO: 8630 - DNA, 172 bp, Artificial Sequence
  Synthetic polynucleotide
atcatctcaccttgcctcctgggtccgacgtgtcagttcctgcaggaattttaatgagaaattttaatgtcgaattttaatggacaattttaatgctaaattttaatgactaattttaatgtgcaattttaatggtaaattttaatgggcgcgccatgcttcatcagactct

SEQ ID NO: 8631 - DNA, 172 bp, Artificial Sequence; identical to SEQ ID NO: 8630
  Synthetic polynucleotide

SEQ ID NO: 8632 - DNA, 180 bp, Artificial Sequence
  Synthetic polynucleotide
atcatctcaccttgcctcctgagcgttgggattatgttcctgcagggtgacatatggagagtgacatatggtcggtgacatatgggacgtgacatatggctagtgacatatggactgtgacatatggtgcgtgacatatgggtagtgacatatggggcgcgccatgcttcatcagactct

SEQ ID NO: 8633 - DNA, 180 bp, Artificial Sequence; identical to SEQ ID NO: 8632
  Synthetic polynucleotide

SEQ ID NO: 8634 - DNA, 191 bp, Artificial Sequence
  Synthetic polynucleotide
atcatctcaccttgcctcctgaagacaggatctagtgccctgcagggtcggtaattatcgcgaagagtcggtaattatcgcgatcggtcggtaattatcgcgagacgtcggtaattatcgcgactagtcggtaattatcgcgaactgtcggtaattatcgcgatgcggcgcgccatgcttcatcagactct

SEQ ID NO: 8635 - DNA, 191 bp, Artificial Sequence; identical to SEQ ID NO: 8634
  Synthetic polynucleotide

SEQ ID NO: 8636 - DNA, 164 bp, Artificial Sequence
  Synthetic polynucleotide
atcatctcaccttgcctcctgcattgaaatccgtgttgcctgcaggaaatgctgaagaaaatgctgatcgaaatgctgagacaaatgctgactaaaatgctgaactaaatgctgatgcaaatgctgagtaaaatgctgaggcgcgccatgcttcatcagactct

SEQ ID NO: 8637 - DNA, 164 bp, Artificial Sequence; identical to SEQ ID NO: 8636
  Synthetic polynucleotide

SEQ ID NO: 8638 - DNA, 185 bp, Artificial Sequence
  Synthetic polynucleotide
atcatctcaccttgcctcctgccgctcatctagggtaacctgcaggtttagaacaataaaatagatttagaacaataaaattcgtttagaacaataaaatgactttagaacaataaaatctatttagaacaataaaatacttttagaacaataaaattgcggcgcgccatgcttcatcagactct

SEQ ID NO: 8639 - DNA, 185 bp, Artificial Sequence; identical to SEQ ID NO: 8638
  Synthetic polynucleotide

SEQ ID NO: 8640 - DNA, 197 bp, Artificial Sequence
  Synthetic polynucleotide
atcatctcaccttgcctcctggtttgtgaccttcgcgacctgcaggggggccgccatcttgagaggggccgccatcttgtcgggggccgccatcttggacggggccgccatcttgctaggggccgccatcttgactggggccgccatcttgtgcggggccgccatcttggtaggcgcgccatgcttcatcagactct

SEQ ID NO: 8641 - DNA, 197 bp, Artificial Sequence; identical to SEQ ID NO: 8640
  Synthetic polynucleotide

SEQ ID NO: 8642 - DNA, 185 bp, Artificial Sequence
  Synthetic polynucleotide
atcatctcaccttgcctcctgctgggacatagtatcaccctgcaggaaaaaccaattaagaaagaaaaaaccaattaagaatcgaaaaaccaattaagaagacaaaaaccaattaagaactaaaaaaccaattaagaaactaaaaaccaattaagaatgcggcgcgccatgcttcatcagactct

SEQ ID NO: 8643 - DNA, 185 bp, Artificial Sequence; identical to SEQ ID NO: 8642
  Synthetic polynucleotide

SEQ ID NO: 8644 - DNA, 172 bp, Artificial Sequence
  Synthetic polynucleotide
atcatctcaccttgcctcctgtattcgagtgactccatcctgcaggagaatattcgagaagaatattcgtcgagaatattcggacagaatattcgctaagaatattcgactagaatattcgtgcagaatattcggtaagaatattcgggcgcgccatgcttcatcagactct

SEQ ID NO: 8645 - DNA, 172 bp, Artificial Sequence; identical to SEQ ID NO: 8644
  Synthetic polynucleotide

SEQ ID NO: 8646 - DNA, 191 bp, Artificial Sequence
  Synthetic polynucleotide
atcatctcaccttgcctcctgtagtcgtaggtattctacctgcaggtgacctttagttgacctagatgacctttagttgaccttcgtgacctttagttgacctgactgacctttagttgacctctatgacctttagttgacctacttgacctttagttgaccttgcggcgcgccatgcttcatcagactct

SEQ ID NO: 8647 - DNA, 191 bp, Artificial Sequence; identical to SEQ ID NO: 8646
  Synthetic polynucleotide

SEQ ID NO: 8648 - DNA, 164 bp, Artificial Sequence
  Synthetic polynucleotide
atcatctcaccttgcctcctgaaaccgtgggcaccttacctgcaggcgctaattaagacgctaattatcgcgctaattagaccgctaattactacgctaattaactcgctaattatgccgctaattagtacgctaattaggcgcgccatgcttcatcagactct

SEQ ID NO: 8649 - DNA, 164 bp, Artificial Sequence; identical to SEQ ID NO: 8648
  Synthetic polynucleotide

SEQ ID NO: 8650 - DNA, 190 bp, Artificial Sequence
  Synthetic polynucleotide
atcatctcaccttgcctcctggactggagtcagacacacctgcaggaatgccacgtcatcagaaatgccacgtcatctcgaatgccacgtcatcgacaatgccacgtcatcctaaatgccacgtcatcactaatgccacgtcatctgcaatgccacgtcatcgtaggcgcgccatgcttcatcagactct

SEQ ID NO: 8651 - DNA, 190 bp, Artificial Sequence; identical to SEQ ID NO: 8650
  Synthetic polynucleotide

SEQ ID NO: 8652 - DNA, 188 bp, Artificial Sequence
  Synthetic polynucleotide
atcatctcaccttgcctcctgctttactcggatttgtgcctgcagggtggtgacgtggagagtggtgacgtggtcggtggtgacgtgggacgtggtgacgtggctagtggtgacgtggactgtggtgacgtggtgcgtggtgacgtgggtagtggtgacgtggggcgcgccatgcttcatcagactct

SEQ ID NO: 8653 - DNA, 188 bp, Artificial Sequence; identical to SEQ ID NO: 8652
  Synthetic polynucleotide

SEQ ID NO: 8654 - DNA, 180 bp, Artificial Sequence
  Synthetic polynucleotide
atcatctcaccttgcctcctgtgcatggtcggaccgtacctgcagggcacaacccagagagcacaacccagtcggcacaacccaggacgcacaacccagctagcacaacccagactgcacaacccagtgcgcacaacccaggtagcacaacccagggcgcgccatgcttcatcagactct

SEQ ID NO: 8655 - DNA, 180 bp, Artificial Sequence; identical to SEQ ID NO: 8654
  Synthetic polynucleotide

SEQ ID NO: 8656 - DNA, 185 bp, Artificial Sequence
  Synthetic polynucleotide
atcatctcaccttgcctcctggctaaatgatagcggtccctgcaggaaagtaattagtgaatagaaaagtaattagtgaattcgaaagtaattagtgaatgacaaagtaattagtgaatctaaaagtaattagtgaatactaaagtaattagtgaattgcggcgcgccatgcttcatcagactct

SEQ ID NO: 8657 - DNA, 185 bp, Artificial Sequence; identical to SEQ ID NO: 8656
  Synthetic polynucleotide

SEQ ID NO: 8658 - DNA, 200 bp, Artificial Sequence
  Synthetic polynucleotide
atcatctcaccttgcctcctgggtgcataaatgagaatcctgcaggcctcgtcacgcatgatggcagacctcgtcacgcatgatggctcgcctcgtcacgcatgatggcgaccctcgtcacgcatgatggcctacctcgtcacgcatgatggcactcctcgtcacgcatgatggcggcgcgccatgcttcatcagactct

SEQ ID NO: 8659 - DNA, 200 bp, Artificial Sequence; identical to SEQ ID NO: 8658
  Synthetic polynucleotide

SEQ ID NO: 8660 - DNA, 172 bp, Artificial Sequence
  Synthetic polynucleotide
atcatctcaccttgcctcctgcctagcccaacacgtgtcctgcagggttgcataacagagttgcataactcggttgcataacgacgttgcataacctagttgcataacactgttgcataactgcgttgcataacgtagttgcataacggcgcgccatgcttcatcagactct

SEQ ID NO: 8661 - DNA, 172 bp, Artificial Sequence; identical to SEQ ID NO: 8660
  Synthetic polynucleotide

SEQ ID NO: 8662 - DNA, 180 bp, Artificial Sequence
  Synthetic polynucleotide
atcatctcaccttgcctcctgggcactattcaagtagtcctgcagggcagataaggaagagcagataaggatcggcagataaggagacgcagataaggactagcagataaggaactgcagataaggatgcgcagataaggagtagcagataaggaggcgcgccatgcttcatcagactct

SEQ ID NO: 8663 - DNA, 180 bp, Artificial Sequence; identical to SEQ ID NO: 8662
  Synthetic polynucleotide

SEQ ID NO: 8664 - DNA, 180 bp, Artificial Sequence
  Synthetic polynucleotide
atcatctcaccttgcctcctgctagcgctaaccgtcttcctgcagggaacagctgtcagagaacagctgtctcggaacagctgtcgacgaacagctgtcctagaacagctgtcactgaacagctgtctgcgaacagctgtcgtagaacagctgtcggcgcgccatgcttcatcagactct

SEQ ID NO: 8665 - DNA, 180 bp, Artificial Sequence; identical to SEQ ID NO: 8664
  Synthetic polynucleotide

SEQ ID NO: 8666 - DNA, 180 bp, Artificial Sequence
  Synthetic polynucleotide
atcatctcaccttgcctcctgatgagaccacatgaaaccctgcaggtttttccttatagatttttccttattcgtttttccttatgactttttccttatctatttttccttatacttttttccttattgctttttccttatgtatttttccttatggcgcgccatgcttcatcagactct

SEQ ID NO: 8667 - DNA, 180 bp, Artificial Sequence; identical to SEQ ID NO: 8666
  Synthetic polynucleotide

SEQ ID NO: 8668 - DNA, 190 bp, Artificial Sequence
  Synthetic polynucleotide
atcatctcaccttgcctcctgcgatgaatgtagctgtacctgcaggaaaaacagtagccgagaaaaaacagtagccgtcgaaaaacagtagccggacaaaaacagtagccgctaaaaaacagtagccgactaaaaacagtagccgtgcaaaaacagtagccggtaggcgcgccatgcttcatcagactct

SEQ ID NO: 8669 - DNA, 190 bp, Artificial Sequence; identical to SEQ ID NO: 8668
  Synthetic polynucleotide

SEQ ID NO: 8670 - DNA, 172 bp, Artificial Sequence
  Synthetic polynucleotide
atcatctcaccttgcctcctgatgatgattcgatatcccctgcaggttccgttattagattccgttatttcgttccgttattgacttccgttattctattccgttattactttccgttatttgcttccgttattgtattccgttattggcgcgccatgcttcatcagactct

SEQ ID NO: 8671 - DNA, 172 bp, Artificial Sequence; identical to SEQ ID NO: 8670
  Synthetic polynucleotide

SEQ ID NO: 8672 - DNA, 172 bp, Artificial Sequence
  Synthetic polynucleotide
atcatctcaccttgcctcctgctgttattcttccgtcgcctgcaggttcttatctgagattcttatctgtcgttcttatctggacttcttatctgctattcttatctgactttcttatctgtgcttcttatctggtattcttatctgggcgcgccatgcttcatcagactct

SEQ ID NO: 8673 - DNA, 172 bp, Artificial Sequence; identical to SEQ ID NO: 8672
  Synthetic polynucleotide

SEQ ID NO: 8674 - DNA, 197 bp, Artificial Sequence
  Synthetic polynucleotide
atcatctcaccttgcctcctgaaactgctacgactgtgcctgcagggggccgcagccctttagagggccgcagcccttttcggggccgcagccctttgacgggccgcagccctttctagggccgcagccctttactgggccgcagcccttttgcgggccgcagccctttgtaggcgcgccatgcttcatcagactct

SEQ ID NO: 8675 - DNA, 197 bp, Artificial Sequence; identical to SEQ ID NO: 8674
  Synthetic polynucleotide

SEQ ID NO: 8676 - DNA, 156 bp, Artificial Sequence
  Synthetic polynucleotide
atcatctcaccttgcctcctgatgccgccactataggtcctgcaggtgactcaaagatgactcaatcgtgactcaagactgactcaactatgactcaaacttgactcaatgctgactcaagtatgactcaaggcgcgccatgcttcatcagactct

SEQ ID NO: 8677 - DNA, 156 bp, Artificial Sequence; identical to SEQ ID NO: 8676
  Synthetic polynucleotide

SEQ ID NO: 8678 - DNA, 196 bp, Artificial Sequence
  Synthetic polynucleotide
atcatctcaccttgcctcctggggtttacggcttataacctgcaggtgtaaataaacaaagatgtaaataaacaatcgtgtaaataaacaagactgtaaataaacaactatgtaaataaacaaacttgtaaataaacaatgctgtaaataaacaagtatgtaaataaacaaggcgcgccatgcttcatcagactct

SEQ ID NO: 8679 - DNA, 196 bp, Artificial Sequence; identical to SEQ ID NO: 8678
  Synthetic polynucleotide

SEQ ID NO: 8680 - DNA, 172 bp, Artificial Sequence
  Synthetic polynucleotide
atcatctcaccttgcctcctgctgcgtccatcctacgacctgcaggactagttaacagaactagttaactcgactagttaacgacactagttaacctaactagttaacactactagttaactgcactagttaacgtaactagttaacggcgcgccatgcttcatcagactct

SEQ ID NO: 8681 - DNA, 172 bp, Artificial Sequence; identical to SEQ ID NO: 8680
  Synthetic polynucleotide

SEQ ID NO: 8682 - DNA, 197 bp, Artificial Sequence
  Synthetic polynucleotide
atcatctcaccttgcctcctgagcacacagtgacccgacctgcaggaagtcagcatttttaagaaagtcagcatttttatcgaagtcagcatttttagacaagtcagcatttttactaaagtcagcatttttaactaagtcagcatttttatgcaagtcagcatttttagtaggcgcgccatgcttcatcagactct

SEQ ID NO: 8683 - DNA, 197 bp, Artificial Sequence; identical to SEQ ID NO: 8682
  Synthetic polynucleotide

SEQ ID NO: 8684 - DNA, 172 bp, Artificial Sequence
  Synthetic polynucleotide
atcatctcaccttgcctcctggagtcggtccattgattcctgcaggaacagctgttagaaacagctgtttcgaacagctgttgacaacagctgttctaaacagctgttactaacagctgtttgcaacagctgttgtaaacagctgttggcgcgccatgcttcatcagactct

SEQ ID NO: 8685 - DNA, 172 bp, Artificial Sequence; identical to SEQ ID NO: 8684
  Synthetic polynucleotide

SEQ ID NO: 8686 - DNA, 200 bp, Artificial Sequence
  Synthetic polynucleotide
atcatctcaccttgcctcctggtaacttaggtaccaaccctgcaggtgtgcagtcatgcgtgaaaagatgtgcagtcatgcgtgaaatcgtgtgcagtcatgcgtgaaagactgtgcagtcatgcgtgaaactatgtgcagtcatgcgtgaaaacttgtgcagtcatgcgtgaaaggcgcgccatgcttcatcagactct

SEQ ID NO: 8687 - DNA, 200 bp, Artificial Sequence; identical to SEQ ID NO: 8686
  Synthetic polynucleotide

SEQ ID NO: 8688 - DNA, 180 bp, Artificial Sequence
  Synthetic polynucleotide
atcatctcaccttgcctcctgcaaaggctgatggttgccctgcagggtgggtgtggcagagtgggtgtggctcggtgggtgtggcgacgtgggtgtggcctagtgggtgtggcactgtgggtgtggctgcgtgggtgtggcgtagtgggtgtggcggcgcgccatgcttcatcagactct

SEQ ID NO: 8689 - DNA, 180 bp, Artificial Sequence; identical to SEQ ID NO: 8688
  Synthetic polynucleotide

SEQ ID NO: 8690 - DNA, 200 bp, Artificial Sequence
  Synthetic polynucleotide
atcatctcaccttgcctcctgctttaaccacgaacacgcctgcaggcctcgtcacgcatgatggaagacctcgtcacgcatgatggatcgcctcgtcacgcatgatggagaccctcgtcacgcatgatggactacctcgtcacgcatgatggaactcctcgtcacgcatgatggaggcgcgccatgcttcatcagactct

SEQ ID NO: 8691 - DNA, 200 bp, Artificial Sequence; identical to SEQ ID NO: 8690
  Synthetic polynucleotide

SEQ ID NO: 8692 - DNA, 172 bp, Artificial Sequence
  Synthetic polynucleotide
atcatctcaccttgcctcctgcatatcacacgccctttcctgcaggtatttgcataagatatttgcatatcgtatttgcatagactatttgcatactatatttgcataacttatttgcatatgctatttgcatagtatatttgcataggcgcgccatgcttcatcagactct

SEQ ID NO: 8693 - DNA, 172 bp, Artificial Sequence; identical to SEQ ID NO: 8692
  Synthetic polynucleotide

SEQ ID NO: 8694 - DNA, 190 bp, Artificial Sequence
  Synthetic polynucleotide
atcatctcaccttgcctcctgttatggcgatcaaacggcctgcagggtttagaacaattaagagtttagaacaattatcggtttagaacaattagacgtttagaacaattactagtttagaacaattaactgtttagaacaattatgcgtttagaacaattagtaggcgcgccatgcttcatcagactct

SEQ ID NO: 8695 - DNA, 190 bp, Artificial Sequence; identical to SEQ ID NO: 8694
  Synthetic polynucleotide

SEQ ID NO: 8696 - DNA, 180 bp, Artificial Sequence
  Synthetic polynucleotide
atcatctcaccttgcctcctggccgcaagaaccgatagcctgcaggggctaattagcagaggctaattagctcgggctaattagcgacggctaattagcctaggctaattagcactggctaattagctgcggctaattagcgtaggctaattagcggcgcgccatgcttcatcagactct

SEQ ID NO: 8697 - DNA, 180 bp, Artificial Sequence; identical to SEQ ID NO: 8696
  Synthetic polynucleotide

SEQ ID NO: 8698 - DNA, 188 bp, Artificial Sequence
  Synthetic polynucleotide
atcatctcaccttgcctcctgggtgctgcgcatttggacctgcaggaatgacgtcaccagaaatgacgtcacctcgaatgacgtcaccgacaatgacgtcaccctaaatgacgtcaccactaatgacgtcacctgcaatgacgtcaccgtaaatgacgtcaccggcgcgccatgcttcatcagactct

SEQ ID NO: 8699 - DNA, 188 bp, Artificial Sequence; identical to SEQ ID NO: 8698
  Synthetic polynucleotide

SEQ ID NO: 8700 - DNA, 197 bp, Artificial Sequence
  Synthetic polynucleotide
atcatctcaccttgcctcctgtggagtgtccgaaagctcctgcagggcacccttgggtgccagagcacccttgggtgcctcggcacccttgggtgccgacgcacccttgggtgccctagcacccttgggtgccactgcacccttgggtgcctgcgcacccttgggtgccgtaggcgcgccatgcttcatcagactct

SEQ ID NO: 8701 - DNA, 197 bp, Artificial Sequence; identical to SEQ ID NO: 8700
  Synthetic polynucleotide

SEQ ID NO: 8702 - DNA, 197 bp, Artificial Sequence
  Synthetic polynucleotide
atcatctcaccttgcctcctgtcttagtaaatgtcgaccctgcaggctgaactttcctgaccccagactgaactttcctgacccctcgctgaactttcctgaccccgacctgaactttcctgaccccctactgaactttcctgaccccactctgaactttcctgacccctgcggcgcgccatgcttcatcagactct

SEQ ID NO: 8703 - DNA, 197 bp, Artificial Sequence; identical to SEQ ID NO: 8702
  Synthetic polynucleotide

SEQ ID NO: 8704 - DNA, 156 bp, Artificial Sequence
  Synthetic polynucleotide
atcatctcaccttgcctcctgggtgactatctgccgtacctgcaggatttccggagaatttccggtcgatttccgggacatttccggctaatttccggactatttccggtgcatttccgggtaatttccggggcgcgccatgcttcatcagactct

SEQ ID NO: 8705 - DNA, 156 bp, Artificial Sequence; identical to SEQ ID NO: 8704
  Synthetic polynucleotide

SEQ ID NO: 8706 - DNA, 188 bp, Artificial Sequence
  Synthetic polynucleotide
atcatctcaccttgcctcctgtgtcctgatgagagaaacctgcagggattgtgtccggagagattgtgtccggtcggattgtgtccgggacgattgtgtccggctagattgtgtccggactgattgtgtccggtgcgattgtgtccgggtagattgtgtccggggcgcgccatgcttcatcagactct

SEQ ID NO: 8707 - DNA, 188 bp, Artificial Sequence; identical to SEQ ID NO: 8706
  Synthetic polynucleotide

SEQ ID NO: 8708 - DNA, 164 bp, Artificial Sequence
  Synthetic polynucleotide
atcatctcaccttgcctcctgatatcctcgactttagccctgcaggtgggaacatagatgggaacattcgtgggaacatgactgggaacatctatgggaacatacttgggaacattgctgggaacatgtatgggaacatggcgcgccatgcttcatcagactct

SEQ ID NO: 8709 - DNA, 164 bp, Artificial Sequence; identical to SEQ ID NO: 8708
  Synthetic polynucleotide

SEQ ID NO: 8710 - DNA, 197 bp, Artificial Sequence
  Synthetic polynucleotide
atcatctcaccttgcctcctggtttactgagttgtcggcctgcaggtgacctcaaatgacctttagatgacctcaaatgaccttttcgtgacctcaaatgacctttgactgacctcaaatgacctttctatgacctcaaatgacctttacttgacctcaaatgaccttttgcggcgcgccatgcttcatcagactct

SEQ ID NO: 8711 - DNA, 197 bp, Artificial Sequence; identical to SEQ ID NO: 8710
  Synthetic polynucleotide

SEQ ID NO: 8712 - DNA, 197 bp, Artificial Sequence
  Synthetic polynucleotide
atcatctcaccttgcctcctgcagaggatacgaagggtcctgcaggaaagtaataaatcatagaaaagtaataaatcattcgaaagtaataaatcatgacaaagtaataaatcatctaaaagtaataaatcatactaaagtaataaatcattgcaaagtaataaatcatgtaggcgcgccatgcttcatcagactct

SEQ ID NO: 8713 - DNA, 197 bp, Artificial Sequence; identical to SEQ ID NO: 8712
  Synthetic polynucleotide

SEQ ID NO: 8714 - DNA, 180 bp, Artificial Sequence
  Synthetic polynucleotide
atcatctcaccttgcctcctgcttgtagtaagggaaaccctgcaggaaatcacagcaagaaaatcacagcatcgaaatcacagcagacaaatcacagcactaaaatcacagcaactaaatcacagcatgcaaatcacagcagtaaaatcacagcaggcgcgccatgcttcatcagactct

SEQ ID NO: 8715 - DNA, 180 bp, Artificial Sequence; identical to SEQ ID NO: 8714
  Synthetic polynucleotide

SEQ ID NO: 8716 - DNA, 197 bp, Artificial Sequence
  Synthetic polynucleotide
atcatctcaccttgcctcctgtctcgaccctggtatttcctgcagggggggttgacgcagaagagggggttgacgcagatcggggggttgacgcagagacgggggttgacgcagactagggggttgacgcagaactgggggttgacgcagatgcgggggttgacgcagagtaggcgcgccatgcttcatcagactct

SEQ ID NO: 8717 - DNA, 197 bp, Artificial Sequence; identical to SEQ ID NO: 8716
  Synthetic polynucleotide

SEQ ID NO: 8718 - DNA, 180 bp, Artificial Sequence
  Synthetic polynucleotide
atcatctcaccttgcctcctggtggctacggaccataacctgcaggaataaacaataagaaataaacaatatcgaataaacaatagacaataaacaatactaaataaacaataactaataaacaatatgcaataaacaatagtaaataaacaataggcgcgccatgcttcatcagactct

SEQ ID NO: 8719 - DNA, 180 bp, Artificial Sequence; identical to SEQ ID NO: 8718
  Synthetic polynucleotide

SEQ ID NO: 8720 - DNA, 172 bp, Artificial Sequence
  Synthetic polynucleotide
atcatctcaccttgcctcctgaacagccgaaagggcgacctgcaggtgacgtcattagatgacgtcatttcgtgacgtcattgactgacgtcattctatgacgtcattacttgacgtcatttgctgacgtcattgtatgacgtcattggcgcgccatgcttcatcagactct

SEQ ID NO: 8721 - DNA, 172 bp, Artificial Sequence; identical to SEQ ID NO: 8720
  Synthetic polynucleotide

SEQ ID NO: 8722 - DNA, 156 bp, Artificial Sequence
  Synthetic polynucleotide
atcatctcaccttgcctcctggtcgggaatcaattggtcctgcagggtaaacagagagtaaacagtcggtaaacaggacgtaaacagctagtaaacagactgtaaacagtgcgtaaacaggtagtaaacagggcgcgccatgcttcatcagactct

SEQ ID NO: 8723 - DNA, 156 bp, Artificial Sequence; identical to SEQ ID NO: 8722
  Synthetic polynucleotide

SEQ ID NO: 8724 - DNA, 188 bp, Artificial Sequence
  Synthetic polynucleotide
atcatctcaccttgcctcctgcgctttcaagcgattagcctgcaggatgaatattcaaagaatgaatattcaatcgatgaatattcaagacatgaatattcaactaatgaatattcaaactatgaatattcaatgcatgaatattcaagtaatgaatattcaaggcgcgccatgcttcatcagactct

SEQ ID NO: 8725 - DNA, 188 bp, Artificial Sequence; identical to SEQ ID NO: 8724
  Synthetic polynucleotide

SEQ ID NO: 8726 - DNA, 191 bp, Artificial Sequence
  Synthetic polynucleotide
atcatctcaccttgcctcctgtgagtttgcttctatagcctgcaggcgggtgacctttgacccctgaagacgggtgacctttgacccctgatcgcgggtgacctttgacccctgagaccgggtgacctttgacccctgactacgggtgacctttgacccctgaactggcgcgccatgcttcatcagactct

SEQ ID NO: 8727 - DNA, 191 bp, Artificial Sequence; identical to SEQ ID NO: 8726
  Synthetic polynucleotide

SEQ ID NO: 8728 - DNA, 185 bp, Artificial Sequence
  Synthetic polynucleotide
atcatctcaccttgcctcctgctaccttgtggttaggacctgcaggttcaattgttctaaaaagattcaattgttctaaaatcgttcaattgttctaaaagacttcaattgttctaaaactattcaattgttctaaaaactttcaattgttctaaaatgcggcgcgccatgcttcatcagactct

SEQ ID NO: 8729 - DNA, 185 bp, Artificial Sequence; identical to SEQ ID NO: 8728
  Synthetic polynucleotide

SEQ ID NO: 8730 - DNA, 197 bp, Artificial Sequence
  Synthetic polynucleotide
atcatctcaccttgcctcctgctgtattggccgaaggccctgcaggccagctcaaaccagcagaccagctcaaaccagctcgccagctcaaaccagcgacccagctcaaaccagcctaccagctcaaaccagcactccagctcaaaccagctgcccagctcaaaccagcgtaggcgcgccatgcttcatcagactct

SEQ ID NO: 8731 - DNA, 197 bp, Artificial Sequence; identical to SEQ ID NO: 8730
  Synthetic polynucleotide

SEQ ID NO: 8732 - DNA, 156 bp, Artificial Sequence
  Synthetic polynucleotide
atcatctcaccttgcctcctggagctggttgtgctagacctgcagggtaaacaaagagtaaacaatcggtaaacaagacgtaaacaactagtaaacaaactgtaaacaatgcgtaaacaagtagtaaacaaggcgcgccatgcttcatcagactct

SEQ ID NO: 8733 - DNA, 156 bp, Artificial Sequence; identical to SEQ ID NO: 8732
  Synthetic polynucleotide

SEQ ID NO: 8734 - DNA, 196 bp, Artificial Sequence
  Synthetic polynucleotide
atcatctcaccttgcctcctgcttaaccggagtcaactcctgcaggcgggggcgcgcttagacgggggcgcgctttcgcgggggcgcgcttgaccgggggcgcgcttctacgggggcgcgcttactcgggggcgcgctttgccgggggcgcgcttgtacgggggcgcgcttggcgcgccatgcttcatcagactct

SEQ ID NO: 8735 - DNA, 196 bp, Artificial Sequence; identical to SEQ ID NO: 8734
  Synthetic polynucleotide

SEQ ID NO: 8736 - DNA, 190 bp, Artificial Sequence
  Synthetic polynucleotide
atcatctcaccttgcctcctgttgaggtatttggaggacctgcaggatgcattaattcatagaatgcattaattcattcgatgcattaattcatgacatgcattaattcatctaatgcattaattcatactatgcattaattcattgcatgcattaattcatgtaggcgcgccatgcttcatcagactct

SEQ ID NO: 8737 - DNA, 190 bp, Artificial Sequence; identical to SEQ ID NO: 8736
  Synthetic polynucleotide

SEQ ID NO: 8738 - DNA, 188 bp, Artificial Sequence
  Synthetic polynucleotide
atcatctcaccttgcctcctgatgggttaatgagaagacctgcaggatgaatattcatagaatgaatattcattcgatgaatattcatgacatgaatattcatctaatgaatattcatactatgaatattcattgcatgaatattcatgtaatgaatattcatggcgcgccatgcttcatcagactct

SEQ ID NO: 8739 - DNA, 188 bp, Artificial Sequence; identical to SEQ ID NO: 8738
  Synthetic polynucleotide

SEQ ID NO: 8740 - DNA, 185 bp, Artificial Sequence
  Synthetic polynucleotide
atcatctcaccttgcctcctgaagttaccgtactatcccctgcaggatcaatgtgcagtgatagaatcaatgtgcagtgattcgatcaatgtgcagtgatgacatcaatgtgcagtgatctaatcaatgtgcagtgatactatcaatgtgcagtgattgcggcgcgccatgcttcatcagactct

SEQ ID NO: 8741 - DNA, 185 bp, Artificial Sequence; identical to SEQ ID NO: 8740
  Synthetic polynucleotide

SEQ ID NO: 8742 - DNA, 172 bp, Artificial Sequence
  Synthetic polynucleotide
atcatctcaccttgcctcctgggcctcgcgtcttacatcctgcaggattacgcaatagaattacgcaattcgattacgcaatgacattacgcaatctaattacgcaatactattacgcaattgcattacgcaatgtaattacgcaatggcgcgccatgcttcatcagactct

SEQ ID NO: 8743 - DNA, 172 bp, Artificial Sequence; identical to SEQ ID NO: 8742
  Synthetic polynucleotide

SEQ ID NO: 8744 - DNA, 185 bp, Artificial Sequence
  Synthetic polynucleotide
atcatctcaccttgcctcctgtatccagagatctgacgcctgcaggcggacacctgttcttcagacggacacctgttcttctcgcggacacctgttcttcgaccggacacctgttcttcctacggacacctgttcttcactcggacacctgttcttctgcggcgcgccatgcttcatcagactct

SEQ ID NO: 8745 - DNA, 185 bp, Artificial Sequence; identical to SEQ ID NO: 8744
  Synthetic polynucleotide

SEQ ID NO: 8746 - DNA, 188 bp, Artificial Sequence
  Synthetic polynucleotide
atcatctcaccttgcctcctgagtcacgtgcggaactacctgcaggcatgactcagacagacatgactcagactcgcatgactcagacgaccatgactcagacctacatgactcagacactcatgactcagactgccatgactcagacgtacatgactcagacggcgcgccatgcttcatcagactct

SEQ ID NO: 8747 - DNA, 188 bp, Artificial Sequence; identical to SEQ ID NO: 8746
  Synthetic polynucleotide

SEQ ID NO: 8748 - DNA, 197 bp, Artificial Sequence
  Synthetic polynucleotide
atcatctcaccttgcctcctgtcttgcatcagaaaccgcctgcagggggtcacgtggcgggagagggtcacgtggcgggtcggggtcacgtggcggggacgggtcacgtggcgggctagggtcacgtggcgggactgggtcacgtggcgggtgcgggtcacgtggcggggtaggcgcgccatgcttcatcagactct

SEQ ID NO: 8749 - DNA, 197 bp, Artificial Sequence; identical to SEQ ID NO: 8748
  Synthetic polynucleotide

SEQ ID NO: 8750 - DNA, 190 bp, Artificial Sequence
  Synthetic polynucleotide
atcatctcaccttgcctcctgtgggtactatagctgtgcctgcaggcagtttcggttctcagacagtttcggttctctcgcagtttcggttctcgaccagtttcggttctcctacagtttcggttctcactcagtttcggttctctgccagtttcggttctcgtaggcgcgccatgcttcatcagactct

SEQ ID NO: 8751 - DNA, 190 bp, Artificial Sequence; identical to SEQ ID NO: 8750
  Synthetic polynucleotide

SEQ ID NO: 8752 - DNA, 180 bp, Artificial Sequence
  Synthetic polynucleotide
atcatctcaccttgcctcctgggagcacctggctgattcctgcaggcccattgttctagacccattgttcttcgcccattgttctgaccccattgttctctacccattgttctactcccattgttcttgccccattgttctgtacccattgttctggcgcgccatgcttcatcagactct

SEQ ID NO: 8753 - DNA, 180 bp, Artificial Sequence; identical to SEQ ID NO: 8752
  Synthetic polynucleotide

SEQ ID NO: 8754 - DNA, 197 bp, Artificial Sequence
  Synthetic polynucleotide
atcatctcaccttgcctcctgcatgttaacgttgtccccctgcaggtgtaattaattatggagatgtaattaattatggtcgtgtaattaattatgggactgtaattaattatggctatgtaattaattatggacttgtaattaattatggtgctgtaattaattatgggtaggcgcgccatgcttcatcagactct

SEQ ID NO: 8755 - DNA, 197 bp, Artificial Sequence; identical to SEQ ID NO: 8754
  Synthetic polynucleotide

SEQ ID NO: 8756 - DNA, 197 bp, Artificial Sequence
  Synthetic polynucleotide
atcatctcaccttgcctcctgttccttgttgaggaatacctgcaggaggacccggaagtaaagaaggacccggaagtaatcgaggacccggaagtaagacaggacccggaagtaactaaggacccggaagtaaactaggacccggaagtaatgcaggacccggaagtaagtaggcgcgccatgcttcatcagactct

SEQ ID NO: 8757 - DNA, 197 bp, Artificial Sequence; identical to SEQ ID NO: 8756
  Synthetic polynucleotide

SEQ ID NO: 8758 - DNA, 180 bp, Artificial Sequence
  Synthetic polynucleotide
atcatctcaccttgcctcctgatcggacaacggcacagcctgcagggtgtccgtctgagagtgtccgtctgtcggtgtccgtctggacgtgtccgtctgctagtgtccgtctgactgtgtccgtctgtgcgtgtccgtctggtagtgtccgtctgggcgcgccatgcttcatcagactct

SEQ ID NO: 8759 - DNA, 180 bp, Artificial Sequence; identical to SEQ ID NO: 8758
  Synthetic polynucleotide

SEQ ID NO: 8760 - DNA, 197 bp, Artificial Sequence
  Synthetic polynucleotide
atcatctcaccttgcctcctgctacggacgagggtacacctgcaggcaccaatatgtatggagacaccaatatgtatggtcgcaccaatatgtatgggaccaccaatatgtatggctacaccaatatgtatggactcaccaatatgtatggtgccaccaatatgtatgggtaggcgcgccatgcttcatcagactct

SEQ ID NO: 8761 - DNA, 197 bp, Artificial Sequence; identical to SEQ ID NO: 8760
  Synthetic polynucleotide

SEQ ID NO: 8762 - DNA, 172 bp, Artificial Sequence
  Synthetic polynucleotide
atcatctcaccttgcctcctgcagggcctaacttagggcctgcaggtgacgtcatcagatgacgtcatctcgtgacgtcatcgactgacgtcatcctatgacgtcatcacttgacgtcatctgctgacgtcatcgtatgacgtcatcggcgcgccatgcttcatcagactct

SEQ ID NO: 8763 - DNA, 172 bp, Artificial Sequence; identical to SEQ ID NO: 8762
  Synthetic polynucleotide

SEQ ID NO: 8764 - DNA, 172 bp, Artificial Sequence
  Synthetic polynucleotide
atcatctcaccttgcctcctgttatgcagactgagggacctgcagggcgatcgattagagcgatcgatttcggcgatcgattgacgcgatcgattctagcgatcgattactgcgatcgatttgcgcgatcgattgtagcgatcgattggcgcgccatgcttcatcagactct

SEQ ID NO: 8765 - DNA, 172 bp, Artificial Sequence; identical to SEQ ID NO: 8764
  Synthetic polynucleotide

SEQ ID NO: 8766 - DNA, 191 bp, Artificial Sequence
  Synthetic polynucleotide
atcatctcaccttgcctcctgcaccgacgtagggtttgcctgcaggaaacaattgcagtgtttagaaaacaattgcagtgttttcgaaacaattgcagtgtttgacaaacaattgcagtgtttctaaaacaattgcagtgtttactaaacaattgcagtgttttgcggcgcgccatgcttcatcagactct

SEQ ID NO: 8767 - DNA, 191 bp, Artificial Sequence; identical to SEQ ID NO: 8766
  Synthetic polynucleotide

SEQ ID NO: 8768 - DNA, 197 bp, Artificial Sequence
  Synthetic polynucleotide
atcatctcaccttgcctcctgaacgcgatgcctgtggacctgcagggcggtgaccttcggactgagagcggtgaccttcggactgtcggcggtgaccttcggactggacgcggtgaccttcggactgctagcggtgaccttcggactgactgcggtgaccttcggactgtgcggcgcgccatgcttcatcagactct

SEQ ID NO: 8769 - DNA, 197 bp, Artificial Sequence; identical to SEQ ID NO: 8768
  Synthetic polynucleotide

SEQ ID NO: 8770 - DNA, 156 bp, Artificial Sequence
  Synthetic polynucleotide
atcatctcaccttgcctcctgtctctcataacttcacgcctgcaggggagttcaagaggagttcatcgggagttcagacggagttcactaggagttcaactggagttcatgcggagttcagtaggagttcaggcgcgccatgcttcatcagactct

SEQ ID NO: 8771 - DNA, 156 bp, Artificial Sequence; identical to SEQ ID NO: 8770
  Synthetic polynucleotide

SEQ ID NO: 8772 - DNA, 180 bp, Artificial Sequence
  Synthetic polynucleotide
atcatctcaccttgcctcctgatgatagcggttacccacctgcagggcacacctgcgagagcacacctgcgtcggcacacctgcggacgcacacctgcgctagcacacctgcgactgcacacctgcgtgcgcacacctgcggtagcacacctgcgggcgcgccatgcttcatcagactct

SEQ ID NO: 8773 - DNA, 180 bp, Artificial Sequence; identical to SEQ ID NO: 8772
  Synthetic polynucleotide

SEQ ID NO: 8774 - DNA, 191 bp, Artificial Sequence
  Synthetic polynucleotide
atcatctcaccttgcctcctgccaacagtgcactacgccctgcaggtcgcgataattaccgacagatcgcgataattaccgactcgtcgcgataattaccgacgactcgcgataattaccgacctatcgcgataattaccgacacttcgcgataattaccgactgcggcgcgccatgcttcatcagactct

SEQ ID NO: 8775 - DNA, 191 bp, Artificial Sequence; identical to SEQ ID NO: 8774
  Synthetic polynucleotide

SEQ ID NO: 8776 - DNA, 172 bp, Artificial Sequence
  Synthetic polynucleotide
atcatctcaccttgcctcctggaacgtgggaactgcgacctgcaggcagataaggcagacagataaggctcgcagataaggcgaccagataaggcctacagataaggcactcagataaggctgccagataaggcgtacagataaggcggcgcgccatgcttcatcagactct

SEQ ID NO: 8777 - DNA, 172 bp, Artificial Sequence; identical to SEQ ID NO: 8776
  Synthetic polynucleotide

SEQ ID NO: 8778 - DNA, 197 bp, Artificial Sequence
  Synthetic polynucleotide
atcatctcaccttgcctcctgggcgagttggtctttagcctgcaggtcaaaaaattgcattagatcaaaaaattgcatttcgtcaaaaaattgcattgactcaaaaaattgcattctatcaaaaaattgcattacttcaaaaaattgcatttgctcaaaaaattgcattgtaggcgcgccatgcttcatcagactct

SEQ ID NO: 8779 - DNA, 197 bp, Artificial Sequence; identical to SEQ ID NO: 8778
  Synthetic polynucleotide

SEQ ID NO: 8780 - DNA, 188 bp, Artificial Sequence
  Synthetic polynucleotide
atcatctcaccttgcctcctgacacgattaggtcacgtcctgcagggggaaatcccccagagggaaatccccctcggggaaatcccccgacgggaaatcccccctagggaaatcccccactgggaaatccccctgcgggaaatcccccgtagggaaatcccccggcgcgccatgcttcatcagactct

SEQ ID NO: 8781 - DNA, 188 bp, Artificial Sequence; identical to SEQ ID NO: 8780
  Synthetic polynucleotide

SEQ ID NO: 8782 - DNA, 197 bp, Artificial Sequence
  Synthetic polynucleotide
atcatctcaccttgcctcctggtctgccagttatttcccctgcaggtacaaacaaagtaataaaagatacaaacaaagtaataaatcgtacaaacaaagtaataaagactacaaacaaagtaataaactatacaaacaaagtaataaaacttacaaacaaagtaataaatgcggcgcgccatgcttcatcagactct

SEQ ID NO: 8783 - DNA, 197 bp, Artificial Sequence; identical to SEQ ID NO: 8782
  Synthetic polynucleotide

SEQ ID NO: 8784 - DNA, 196 bp, Artificial Sequence
  Synthetic polynucleotide
atcatctcaccttgcctcctggatctcggatcatacgccctgcaggtaatttatgcataagataatttatgcatatcgtaatttatgcatagactaatttatgcatactataatttatgcataacttaatttatgcatatgctaatttatgcatagtataatttatgcataggcgcgccatgcttcatcagactct

SEQ ID NO: 8785 - DNA, 196 bp, Artificial Sequence; identical to SEQ ID NO: 8784
  Synthetic polynucleotide

SEQ ID NO: 8786 - DNA, 190 bp, Artificial Sequence
  Synthetic polynucleotide
atcatctcaccttgcctcctggactcgataaagaacaacctgcaggattaattacctcagagaattaattacctcagtcgattaattacctcaggacattaattacctcagctaattaattacctcagactattaattacctcagtgcattaattacctcaggtaggcgcgccatgcttcatcagactct

SEQ ID NO: 8787 - DNA, 190 bp, Artificial Sequence; identical to SEQ ID NO: 8786
  Synthetic polynucleotide

SEQ ID NO: 8788 - DNA, 197 bp, Artificial Sequence
  Synthetic polynucleotide
atcatctcaccttgcctcctgcactatggtcttgaatccctgcaggatcaataacattgatagaatcaataacattgattcgatcaataacattgatgacatcaataacattgatctaatcaataacattgatactatcaataacattgattgcatcaataacattgatgtaggcgcgccatgcttcatcagactct

SEQ ID NO: 8789 - DNA, 197 bp, Artificial Sequence; identical to SEQ ID NO: 8788
  Synthetic polynucleotide

SEQ ID NO: 8790 - DNA, 191 bp, Artificial Sequence
  Synthetic polynucleotide
atcatctcaccttgcctcctgcaggagtaagcacgcgtcctgcagggatgattaatcccttcaagagatgattaatcccttcatcggatgattaatcccttcagacgatgattaatcccttcactagatgattaatcccttcaactgatgattaatcccttcatgcggcgcgccatgcttcatcagactct

SEQ ID NO: 8791 - DNA, 191 bp, Artificial Sequence; identical to SEQ ID NO: 8790
  Synthetic polynucleotide

SEQ ID NO: 8792 - DNA, 156 bp, Artificial Sequence
  Synthetic polynucleotide
atcatctcaccttgcctcctgaagcagtggtgctgaatcctgcagggcatgagtagagcatgagttcggcatgagtgacgcatgagtctagcatgagtactgcatgagttgcgcatgagtgtagcatgagtggcgcgccatgcttcatcagactct

SEQ ID NO: 8793 - DNA, 156 bp, Artificial Sequence; identical to SEQ ID NO: 8792
  Synthetic polynucleotide

SEQ ID NO: 8794 - DNA, 186 bp, Artificial Sequence
  Synthetic polynucleotide
atcatctcaccttgcctcctgtgttagccggcctgaaccctgcaggtcacaccttttttcacacctagatcacaccttttttcacaccttcgtcacaccttttttcacacctgactcacaccttttttcacacctctatcacaccttttttcacacctactggcgcgccatgcttcatcagactct

SEQ ID NO: 8795 - DNA, 186 bp, Artificial Sequence; identical to SEQ ID NO: 8794
  Synthetic polynucleotide

SEQ ID NO: 8796 - DNA, 196 bp, Artificial Sequence
  Synthetic polynucleotide
atcatctcaccttgcctcctgtctggtggaattgtaggcctgcagggcacgtgtcgttaagagcacgtgtcgttatcggcacgtgtcgttagacgcacgtgtcgttactagcacgtgtcgttaactgcacgtgtcgttatgcgcacgtgtcgttagtagcacgtgtcgttaggcgcgccatgcttcatcagactct

SEQ ID NO: 8797 - DNA, 196 bp, Artificial Sequence; identical to SEQ ID NO: 8796
  Synthetic polynucleotide

SEQ ID NO: 8798 - DNA, 172 bp, Artificial Sequence
  Synthetic polynucleotide
atcatctcaccttgcctcctggttaattccgcgccgcacctgcaggtgtctggaatagatgtctggaattcgtgtctggaatgactgtctggaatctatgtctggaatacttgtctggaattgctgtctggaatgtatgtctggaatggcgcgccatgcttcatcagactct

SEQ ID NO: 8799 - DNA, 172 bp, Artificial Sequence; identical to SEQ ID NO: 8798
  Synthetic polynucleotide

SEQ ID NO: 8800 - DNA, 197 bp, Artificial Sequence
  Synthetic polynucleotide
atcatctcaccttgcctcctgtcctcttaccaatagaccctgcaggcagccaagcgtgaccagacagccaagcgtgacctcgcagccaagcgtgaccgaccagccaagcgtgaccctacagccaagcgtgaccactcagccaagcgtgacctgccagccaagcgtgaccgtaggcgcgccatgcttcatcagactct

SEQ ID NO: 8801 - DNA, 197 bp, Artificial Sequence; identical to SEQ ID NO: 8800
  Synthetic polynucleotide

SEQ ID NO: 8802 - DNA, 188 bp, Artificial Sequence
  Synthetic polynucleotide
atcatctcaccttgcctcctgtatagctaaggcaggttcctgcagggggaaatccccaagagggaaatccccatcggggaaatccccagacgggaaatccccactagggaaatccccaactgggaaatccccatgcgggaaatccccagtagggaaatccccaggcgcgccatgcttcatcagactct

SEQ ID NO: 8803 - DNA, 188 bp, Artificial Sequence; identical to SEQ ID NO: 8802
  Synthetic polynucleotide

SEQ ID NO: 8804 - DNA, 156 bp, Artificial Sequence
  Synthetic polynucleotide
atcatctcaccttgcctcctggactatatctggagtcacctgcagggtaaacatagagtaaacattcggtaaacatgacgtaaacatctagtaaacatactgtaaacattgcgtaaacatgtagtaaacatggcgcgccatgcttcatcagactct

SEQ ID NO: 8805 - DNA, 156 bp, Artificial Sequence; identical to SEQ ID NO: 8804
  Synthetic polynucleotide

SEQ ID NO: 8806 - DNA, 172 bp, Artificial Sequence
  Synthetic polynucleotide
atcatctcaccttgcctcctgctattactccgtttgttcctgcaggtcccacttgaagatcccacttgatcgtcccacttgagactcccacttgactatcccacttgaacttcccacttgatgctcccacttgagtatcccacttgaggcgcgccatgcttcatcagactct

SEQ ID NO: 8807 - DNA, 172 bp, Artificial Sequence; identical to SEQ ID NO: 8806
  Synthetic polynucleotide

SEQ ID NO: 8808 - DNA, 190 bp, Artificial Sequence
  Synthetic polynucleotide
atcatctcaccttgcctcctgctatcccaatttcgccacctgcaggagatcacgtgatctagaagatcacgtgatcttcgagatcacgtgatctgacagatcacgtgatctctaagatcacgtgatctactagatcacgtgatcttgcagatcacgtgatctgtaggcgcgccatgcttcatcagactct

SEQ ID NO: 8809 - DNA, 190 bp, Artificial Sequence; identical to SEQ ID NO: 8808
  Synthetic polynucleotide

SEQ ID NO: 8810 - DNA, 190 bp, Artificial Sequence
  Synthetic polynucleotide
atcatctcaccttgcctcctgcatccacaggagcgcttcctgcagggggaaaaccacagcagagggaaaaccacagctcggggaaaaccacagcgacgggaaaaccacagcctagggaaaaccacagcactgggaaaaccacagctgcgggaaaaccacagcgtaggcgcgccatgcttcatcagactct

SEQ ID NO: 8811 - DNA, 190 bp, Artificial Sequence; identical to SEQ ID NO: 8810
  Synthetic polynucleotide

SEQ ID NO: 8812 - DNA, 180 bp, Artificial Sequence
  Synthetic polynucleotide
atcatctcaccttgcctcctggatgttaaagccctttacctgcagggtgggggcgacagagtgggggcgactcggtgggggcgacgacgtgggggcgacctagtgggggcgacactgtgggggcgactgcgtgggggcgacgtagtgggggcgacggcgcgccatgcttcatcagactct

SEQ ID NO: 8813 - DNA, 180 bp, Artificial Sequence; identical to SEQ ID NO: 8812
  Synthetic polynucleotide

SEQ ID NO: 8814 - DNA, 172 bp, Artificial Sequence
  Synthetic polynucleotide
atcatctcaccttgcctcctgaaccgatttacccactgcctgcaggccacgtgctcagaccacgtgctctcgccacgtgctcgacccacgtgctcctaccacgtgctcactccacgtgctctgcccacgtgctcgtaccacgtgctcggcgcgccatgcttcatcagactct

SEQ ID NO: 8815 - DNA, 172 bp, Artificial Sequence; identical to SEQ ID NO: 8814
  Synthetic polynucleotide

SEQ ID NO: 8816 - DNA, 164 bp, Artificial Sequence
  Synthetic polynucleotide
atcatctcaccttgcctcctgatatcggaccctgcgtccctgcaggttgattgatagattgattgattcgttgattgatgacttgattgatctattgattgatactttgattgattgcttgattgatgtattgattgatggcgcgccatgcttcatcagactct

SEQ ID NO: 8817 - DNA, 164 bp, Artificial Sequence; identical to SEQ ID NO: 8816
  Synthetic polynucleotide

SEQ ID NO: 8818 - DNA, 197 bp, Artificial Sequence
  Synthetic polynucleotide
atcatctcaccttgcctcctgcgggcacgccgtaattacctgcaggtttggtttcgatacgagatttggtttcgatacgtcgtttggtttcgatacggactttggtttcgatacgctatttggtttcgatacgacttttggtttcgatacgtgctttggtttcgatacggtaggcgcgccatgcttcatcagactct

SEQ ID NO: 8819 - DNA, 197 bp, Artificial Sequence; identical to SEQ ID NO: 8818
  Synthetic polynucleotide

SEQ ID NO: 8820 - DNA, 172 bp, Artificial Sequence
  Synthetic polynucleotide
atcatctcaccttgcctcctgtcggtaacagacgaactcctgcaggttttatgggcagattttatgggctcgttttatgggcgacttttatgggcctattttatgggcactttttatgggctgcttttatgggcgtattttatgggcggcgcgccatgcttcatcagactct

SEQ ID NO: 8821 - DNA, 172 bp, Artificial Sequence; identical to SEQ ID NO: 8820
  Synthetic polynucleotide

SEQ ID NO: 8822 - DNA, 197 bp, Artificial Sequence
  Synthetic polynucleotide
atcatctcaccttgcctcctggcttcggaaacactagtcctgcaggtcatctgttgctaggagatcatctgttgctaggtcgtcatctgttgctagggactcatctgttgctaggctatcatctgttgctaggacttcatctgttgctaggtgctcatctgttgctagggtaggcgcgccatgcttcatcagactct

SEQ ID NO: 8823 - DNA, 197 bp, Artificial Sequence; identical to SEQ ID NO: 8822
  Synthetic polynucleotide

SEQ ID NO: 8824 - DNA, 185 bp, Artificial Sequence
  Synthetic polynucleotide
atcatctcaccttgcctcctgacgtgctaccgtacgtgcctgcaggtaaggtaataaaattaagataaggtaataaaattatcgtaaggtaataaaattagactaaggtaataaaattactataaggtaataaaattaacttaaggtaataaaattatgcggcgcgccatgcttcatcagactct

SEQ ID NO: 8825 - DNA, 185 bp, Artificial Sequence; identical to SEQ ID NO: 8824
  Synthetic polynucleotide

SEQ ID NO: 8826 - DNA, 185 bp, Artificial Sequence
  Synthetic polynucleotide
atcatctcaccttgcctcctgcgtgtcgttcgagaggtcctgcaggtctttcgaggaatttgagatctttcgaggaatttgtcgtctttcgaggaatttggactctttcgaggaatttgctatctttcgaggaatttgacttctttcgaggaatttgtgcggcgcgccatgcttcatcagactct

SEQ ID NO: 8827 - DNA, 185 bp, Artificial Sequence; identical to SEQ ID NO: 8826
  Synthetic polynucleotide

SEQ ID NO: 8828 - DNA, 188 bp, Artificial Sequence
  Synthetic polynucleotide
atcatctcaccttgcctcctggtcaccctcagtgttaccctgcaggggttacgcaataagaggttacgcaatatcgggttacgcaatagacggttacgcaatactaggttacgcaataactggttacgcaatatgcggttacgcaatagtaggttacgcaataggcgcgccatgcttcatcagactct

SEQ ID NO: 8829 - DNA, 188 bp, Artificial Sequence; identical to SEQ ID NO: 8828
  Synthetic polynucleotide

SEQ ID NO: 8830 - DNA, 197 bp, Artificial Sequence
  Synthetic polynucleotide
atcatctcaccttgcctcctgcacacagaaactatgcccctgcaggtgctgagtcatgctgagatgctgagtcatgctgtcgtgctgagtcatgctggactgctgagtcatgctgctatgctgagtcatgctgacttgctgagtcatgctgtgctgctgagtcatgctggtaggcgcgccatgcttcatcagactct

SEQ ID NO: 8831 - DNA, 197 bp, Artificial Sequence; identical to SEQ ID NO: 8830
  Synthetic polynucleotide

SEQ ID NO: 8832 - DNA, 172 bp, Artificial Sequence
  Synthetic polynucleotide
atcatctcaccttgcctcctgcaacttcagggtattaccctgcaggatgagtcaccagaatgagtcacctcgatgagtcaccgacatgagtcaccctaatgagtcaccactatgagtcacctgcatgagtcaccgtaatgagtcaccggcgcgccatgcttcatcagactct

SEQ ID NO: 8833 - DNA, 172 bp, Artificial Sequence; identical to SEQ ID NO: 8832
  Synthetic polynucleotide

SEQ ID NO: 8834 - DNA, 188 bp, Artificial Sequence
  Synthetic polynucleotide
atcatctcaccttgcctcctggacgatagcagtggagacctgcaggcatgactcagcaagacatgactcagcatcgcatgactcagcagaccatgactcagcactacatgactcagcaactcatgactcagcatgccatgactcagcagtacatgactcagcaggcgcgccatgcttcatcagactct

SEQ ID NO: 8835 - DNA, 188 bp, Artificial Sequence; identical to SEQ ID NO: 8834
  Synthetic polynucleotide

SEQ ID NO: 8836 - DNA, 188 bp, Artificial Sequence
  Synthetic polynucleotide
atcatctcaccttgcctcctggtagagtagcatgctagcctgcagggaattaatgaccagagaattaatgacctcggaattaatgaccgacgaattaatgaccctagaattaatgaccactgaattaatgacctgcgaattaatgaccgtagaattaatgaccggcgcgccatgcttcatcagactct

SEQ ID NO: 8837 - DNA, 188 bp, Artificial Sequence; identical to SEQ ID NO: 8836
  Synthetic polynucleotide

SEQ ID NO: 8838 - DNA, 191 bp, Artificial Sequence
  Synthetic polynucleotide
atcatctcaccttgcctcctgacattctggctgcgcaccctgcaggcagcagccgccggcgcgagacagcagccgccggcgcgtcgcagcagccgccggcgcggaccagcagccgccggcgcgctacagcagccgccggcgcgactcagcagccgccggcgcgtgcggcgcgccatgcttcatcagactct

SEQ ID NO: 8839 - DNA, 191 bp, Artificial Sequence; identical to SEQ ID NO: 8838
  Synthetic polynucleotide

SEQ ID NO: 8840 - DNA, 197 bp, Artificial Sequence
  Synthetic polynucleotide
atcatctcaccttgcctcctggcgttctacatatgcaacctgcagggaattccaggaaataagagaattccaggaaatatcggaattccaggaaatagacgaattccaggaaatactagaattccaggaaataactgaattccaggaaatatgcgaattccaggaaatagtaggcgcgccatgcttcatcagactct

SEQ ID NO: 8841 - DNA, 197 bp, Artificial Sequence; identical to SEQ ID NO: 8840
  Synthetic polynucleotide

SEQ ID NO: 8842 - DNA, 196 bp, Artificial Sequence
  Synthetic polynucleotide
atcatctcaccttgcctcctgatgtcccttatcccacgcctgcaggaaccaattaatatagaaaccaattaatattcgaaccaattaatatgacaaccaattaatatctaaaccaattaatatactaaccaattaatattgcaaccaattaatatgtaaaccaattaatatggcgcgccatgcttcatcagactct

SEQ ID NO: 8843 - DNA, 196 bp, Artificial Sequence; identical to SEQ ID NO: 8842
  Synthetic polynucleotide

SEQ ID NO: 8844 - DNA, 197 bp, Artificial Sequence
  Synthetic polynucleotide
atcatctcaccttgcctcctgatcggcgactgagtctgcctgcaggtgcacacactgaaaaagatgcacacactgaaaatcgtgcacacactgaaaagactgcacacactgaaaactatgcacacactgaaaaacttgcacacactgaaaatgctgcacacactgaaaagtaggcgcgccatgcttcatcagactct

SEQ ID NO: 8845 - DNA, 197 bp, Artificial Sequence; identical to SEQ ID NO: 8844
  Synthetic polynucleotide

SEQ ID NO: 8846 - DNA, 188 bp, Artificial Sequence
  Synthetic polynucleotide
atcatctcaccttgcctcctgcctctctgtacatggcgcctgcaggacgcccacgcaaagaacgcccacgcaatcgacgcccacgcaagacacgcccacgcaactaacgcccacgcaaactacgcccacgcaatgcacgcccacgcaagtaacgcccacgcaaggcgcgccatgcttcatcagactct

SEQ ID NO: 8847 - DNA, 188 bp, Artificial Sequence; identical to SEQ ID NO: 8846
  Synthetic polynucleotide

SEQ ID NO: 8848 - DNA, 172 bp, Artificial Sequence
  Synthetic polynucleotide
atcatctcaccttgcctcctgtctctgttggttcacatcctgcaggggacagcgccagaggacagcgcctcgggacagcgccgacggacagcgccctaggacagcgccactggacagcgcctgcggacagcgccgtaggacagcgccggcgcgccatgcttcatcagactct

SEQ ID NO: 8849 - DNA, 172 bp, Artificial Sequence; identical to SEQ ID NO: 8848
  Synthetic polynucleotide

SEQ ID NO: 8850 - DNA, 188 bp, Artificial Sequence
  Synthetic polynucleotide
atcatctcaccttgcctcctgtcttcgtttgcagcaagcctgcagggaccacgtggtcagagaccacgtggtctcggaccacgtggtcgacgaccacgtggtcctagaccacgtggtcactgaccacgtggtctgcgaccacgtggtcgtagaccacgtggtcggcgcgccatgcttcatcagactct

SEQ ID NO: 8851 - DNA, 188 bp, Artificial Sequence; identical to SEQ ID NO: 8850
  Synthetic polynucleotide

SEQ ID NO: 8852 - DNA, 156 bp, Artificial Sequence
  Synthetic polynucleotide
atcatctcaccttgcctcctgtgatgaaggccgctggtcctgcagggtcataaaagagtcataaatcggtcataaagacgtcataaactagtcataaaactgtcataaatgcgtcataaagtagtcataaaggcgcgccatgcttcatcagactct

SEQ ID NO: 8853 - DNA, 156 bp, Artificial Sequence; identical to SEQ ID NO: 8852
  Synthetic polynucleotide

SEQ ID NO: 8854 - DNA, 156 bp, Artificial Sequence
  Synthetic polynucleotide
atcatctcaccttgcctcctgtgtatcttgaagggctacctgcagggtgctcctagagtgctccttcggtgctcctgacgtgctcctctagtgctcctactgtgctccttgcgtgctcctgtagtgctcctggcgcgccatgcttcatcagactct

SEQ ID NO: 8855 - DNA, 156 bp, Artificial Sequence; identical to SEQ ID NO: 8854
  Synthetic polynucleotide

SEQ ID NO: 8856 - DNA, 172 bp, Artificial Sequence
  Synthetic polynucleotide
atcatctcaccttgcctcctgttgttaagggagcattgcctgcaggtaatcgataaagataatcgataatcgtaatcgataagactaatcgataactataatcgataaacttaatcgataatgctaatcgataagtataatcgataaggcgcgccatgcttcatcagactct

SEQ ID NO: 8857 - DNA, 172 bp, Artificial Sequence; identical to SEQ ID NO: 8856
  Synthetic polynucleotide

SEQ ID NO: 8858 - DNA, 196 bp, Artificial Sequence
  Synthetic polynucleotide
atcatctcaccttgcctcctggtatcaggtgttgcccacctgcaggcatataaacaatgagacatataaacaatgtcgcatataaacaatggaccatataaacaatgctacatataaacaatgactcatataaacaatgtgccatataaacaatggtacatataaacaatgggcgcgccatgcttcatcagactct

SEQ ID NO: 8859 - DNA, 196 bp, Artificial Sequence; identical to SEQ ID NO: 8858
  Synthetic polynucleotide

SEQ ID NO: 8860 - DNA, 156 bp, Artificial Sequence
  Synthetic polynucleotide
atcatctcaccttgcctcctgatcttggaaatatgtcgcctgcaggccgcccccagaccgccccctcgccgcccccgacccgcccccctaccgcccccactccgccccctgcccgcccccgtaccgcccccggcgcgccatgcttcatcagactct

SEQ ID NO: 8861 - DNA, 156 bp, Artificial Sequence; identical to SEQ ID NO: 8860
  Synthetic polynucleotide

SEQ ID NO: 8862 - DNA, 196 bp, Artificial Sequence
  Synthetic polynucleotide
atcatctcaccttgcctcctgtgacctatgcagacctccctgcaggcttgtttacttagagacttgtttacttagtcgcttgtttacttaggaccttgtttacttagctacttgtttacttagactcttgtttacttagtgccttgtttacttaggtacttgtttacttagggcgcgccatgcttcatcagactct

SEQ ID NO: 8863 - DNA, 196 bp, Artificial Sequence; identical to SEQ ID NO: 8862
  Synthetic polynucleotide

SEQ ID NO: 8864 - DNA, 164 bp, Artificial Sequence
  Synthetic polynucleotide
atcatctcaccttgcctcctgctagacgcacccagagtcctgcaggttgtttaccagattgtttacctcgttgtttaccgacttgtttaccctattgtttaccactttgtttacctgcttgtttaccgtattgtttaccggcgcgccatgcttcatcagactct

SEQ ID NO: 8865 - DNA, 164 bp, Artificial Sequence; identical to SEQ ID NO: 8864
  Synthetic polynucleotide

SEQ ID NO: 8866 - DNA, 164 bp, Artificial Sequence
  Synthetic polynucleotide
atcatctcaccttgcctcctggttaaacagggccctcccctgcaggttgtttacaagattgtttacatcgttgtttacagacttgtttacactattgtttacaactttgtttacatgcttgtttacagtattgtttacaggcgcgccatgcttcatcagactct

SEQ ID NO: 8867 - DNA, 164 bp, Artificial Sequence; identical to SEQ ID NO: 8866
  Synthetic polynucleotide

SEQ ID NO: 8868 - DNA, 197 bp, Artificial Sequence
  Synthetic polynucleotide
atcatctcaccttgcctcctgctccatggtgagtacgtcctgcaggcagttttcgcgcgtaagacagttttcgcgcgtatcgcagttttcgcgcgtagaccagttttcgcgcgtactacagttttcgcgcgtaactcagttttcgcgcgtatgccagttttcgcgcgtagtaggcgcgccatgcttcatcagactct

SEQ ID NO: 8869 - DNA, 197 bp, Artificial Sequence; identical to SEQ ID NO: 8868
  Synthetic polynucleotide

SEQ ID NO: 8870 - DNA, 156 bp, Artificial Sequence
  Synthetic polynucleotide
atcatctcaccttgcctcctgtggcctgaaacccaagacctgcaggcacgtgacagacacgtgactcgcacgtgacgaccacgtgacctacacgtgacactcacgtgactgccacgtgacgtacacgtgacggcgcgccatgcttcatcagactct

SEQ ID NO: 8871 - DNA, 156 bp, Artificial Sequence; identical to SEQ ID NO: 8870
  Synthetic polynucleotide

SEQ ID NO: 8872 - DNA, 172 bp, Artificial Sequence
  Synthetic polynucleotide
atcatctcaccttgcctcctgatgtgccgtaccatccacctgcagggcacatgaatagagcacatgaattcggcacatgaatgacgcacatgaatctagcacatgaatactgcacatgaattgcgcacatgaatgtagcacatgaatggcgcgccatgcttcatcagactct

SEQ ID NO: 8873 - DNA, 172 bp, Artificial Sequence; identical to SEQ ID NO: 8872
  Synthetic polynucleotide

SEQ ID NO: 8874 - DNA, 156 bp, Artificial Sequence
  Synthetic polynucleotide
atcatctcaccttgcctcctgctgaatagccgctttatcctgcaggcacgtgatagacacgtgattcgcacgtgatgaccacgtgatctacacgtgatactcacgtgattgccacgtgatgtacacgtgatggcgcgccatgcttcatcagactct

SEQ ID NO: 8875 - DNA, 156 bp, Artificial Sequence; identical to SEQ ID NO: 8874
  Synthetic polynucleotide

SEQ ID NO: 8876 - DNA, 191 bp, Artificial Sequence
  Synthetic polynucleotide
atcatctcaccttgcctcctggtgagttcttgaatcatcctgcaggcccccaagaacaccatgtcccccccccagacccccaagaacaccatgtccccccccctcgcccccaagaacaccatgtcccccccccgaccccccaagaacaccatgtcccccccccctaggcgcgccatgcttcatcagactct

SEQ ID NO: 8877 - DNA, 191 bp, Artificial Sequence; identical to SEQ ID NO: 8876
  Synthetic polynucleotide

SEQ ID NO: 8878 - DNA, 172 bp, Artificial Sequence
  Synthetic polynucleotide
atcatctcaccttgcctcctgcactacctaccgatcggcctgcaggcctgctgtggagacctgctgtggtcgcctgctgtgggaccctgctgtggctacctgctgtggactcctgctgtggtgccctgctgtgggtacctgctgtggggcgcgccatgcttcatcagactct

SEQ ID NO: 8879 - DNA, 172 bp, Artificial Sequence; identical to SEQ ID NO: 8878
  Synthetic polynucleotide

SEQ ID NO: 8880 - DNA, 156 bp, Artificial Sequence
  Synthetic polynucleotide
atcatctcaccttgcctcctggttctctttgagtgtaccctgcagggtgctcccagagtgctccctcggtgctcccgacgtgctcccctagtgctcccactgtgctccctgcgtgctcccgtagtgctcccggcgcgccatgcttcatcagactct

SEQ ID NO: 8881 - DNA, 156 bp, Artificial Sequence; identical to SEQ ID NO: 8880
  Synthetic polynucleotide

SEQ ID NO: 8882 - DNA, 172 bp, Artificial Sequence
  Synthetic polynucleotide
atcatctcaccttgcctcctgagatgcaggaccgactacctgcagggctcataaaaagagctcataaaatcggctcataaaagacgctcataaaactagctcataaaaactgctcataaaatgcgctcataaaagtagctcataaaaggcgcgccatgcttcatcagactct

SEQ ID NO: 8883 - DNA, 172 bp, Artificial Sequence; identical to SEQ ID NO: 8882
  Synthetic polynucleotide

SEQ ID NO: 8884 - DNA, 164 bp, Artificial Sequence
  Synthetic polynucleotide
atcatctcaccttgcctcctgagtcctaccggatgtgtcctgcaggttgtttactagattgtttacttcgttgtttactgacttgtttactctattgtttactactttgtttacttgcttgtttactgtattgtttactggcgcgccatgcttcatcagactct

SEQ ID NO: 8885 - DNA, 164 bp, Artificial Sequence; identical to SEQ ID NO: 8884
  Synthetic polynucleotide

SEQ ID NO: 8886 - DNA, 190 bp, Artificial Sequence
  Synthetic polynucleotide
atcatctcaccttgcctcctgtcttgcgtagtgtttggcctgcaggggggtcatgacctcagaggggtcatgacctctcgggggtcatgacctcgacggggtcatgacctcctaggggtcatgacctcactggggtcatgacctctgcggggtcatgacctcgtaggcgcgccatgcttcatcagactct

SEQ ID NO: 8887 - DNA, 190 bp, Artificial Sequence; identical to SEQ ID NO: 8886
  Synthetic polynucleotide

SEQ ID NO: 8888 - DNA, 188 bp, Artificial Sequence
  Synthetic polynucleotide
atcatctcaccttgcctcctgctcgagttcacacacgacctgcaggttgtttacttagagattgtttacttagtcgttgtttacttaggacttgtttacttagctattgtttacttagactttgtttacttagtgcttgtttacttaggtattgtttacttagggcgcgccatgcttcatcagactct

SEQ ID NO: 8889 - DNA, 188 bp, Artificial Sequence; identical to SEQ ID NO: 8888
  Synthetic polynucleotide

SEQ ID NO: 8890 - DNA, 172 bp, Artificial Sequence
  Synthetic polynucleotide
atcatctcaccttgcctcctgtccactggagtgggaatcctgcagggtcccgcaacagagtcccgcaactcggtcccgcaacgacgtcccgcaacctagtcccgcaacactgtcccgcaactgcgtcccgcaacgtagtcccgcaacggcgcgccatgcttcatcagactct

SEQ ID NO: 8891 - DNA, 172 bp, Artificial Sequence; identical to SEQ ID NO: 8890
  Synthetic polynucleotide

SEQ ID NO: 8892 - DNA, 196 bp, Artificial Sequence
  Synthetic polynucleotide
atcatctcaccttgcctcctggtcgcatccagagccatcctgcaggaggtcaaaggtcaagaaggtcaaaggtcatcgaggtcaaaggtcagacaggtcaaaggtcactaaggtcaaaggtcaactaggtcaaaggtcatgcaggtcaaaggtcagtaaggtcaaaggtcaggcgcgccatgcttcatcagactct

SEQ ID NO: 8893 - DNA, 196 bp, Artificial Sequence; identical to SEQ ID NO: 8892
  Synthetic polynucleotide

SEQ ID NO: 8894 - DNA, 164 bp, Artificial Sequence
  Synthetic polynucleotide
atcatctcaccttgcctcctggaggttgccagcctgttcctgcaggaaggtgctgagaaaggtgctgtcgaaggtgctggacaaggtgctgctaaaggtgctgactaaggtgctgtgcaaggtgctggtaaaggtgctgggcgcgccatgcttcatcagactct

SEQ ID NO: 8895 - DNA, 164 bp, Artificial Sequence; identical to SEQ ID NO: 8894
  Synthetic polynucleotide

SEQ ID NO: 8896 - DNA, 190 bp, Artificial Sequence
  Synthetic polynucleotide
atcatctcaccttgcctcctgatccattaacgggctgtcctgcaggcaaaatgacatgcaagacaaaatgacatgcatcgcaaaatgacatgcagaccaaaatgacatgcactacaaaatgacatgcaactcaaaatgacatgcatgccaaaatgacatgcagtaggcgcgccatgcttcatcagactct

SEQ ID NO: 8897 - DNA, 190 bp, Artificial Sequence; identical to SEQ ID NO: 8896
  Synthetic polynucleotide

SEQ ID NO: 8898 - DNA, 190 bp, Artificial Sequence
  Synthetic polynucleotide
atcatctcaccttgcctcctgtgcatgggtagttcccacctgcaggcatgtaaataatgcagacatgtaaataatgctcgcatgtaaataatgcgaccatgtaaataatgcctacatgtaaataatgcactcatgtaaataatgctgccatgtaaataatgcgtaggcgcgccatgcttcatcagactct

SEQ ID NO: 8899 - DNA, 190 bp, Artificial Sequence; identical to SEQ ID NO: 8898
  Synthetic polynucleotide

SEQ ID NO: 8900 - DNA, 185 bp, Artificial Sequence
  Synthetic polynucleotide
atcatctcaccttgcctcctgaccgatcgtataggcctcctgcaggacgatgacgtcatcgaagaacgatgacgtcatcgatcgacgatgacgtcatcgagacacgatgacgtcatcgactaacgatgacgtcatcgaactacgatgacgtcatcgatgcggcgcgccatgcttcatcagactct

SEQ ID NO: 8901 - DNA, 185 bp, Artificial Sequence; identical to SEQ ID NO: 8900
  Synthetic polynucleotide

SEQ ID NO: 8902 - DNA, 185 bp, Artificial Sequence
  Synthetic polynucleotide
atcatctcaccttgcctcctgttcttcagttgtaccagcctgcaggacgatgacgtcatcggagaacgatgacgtcatcggtcgacgatgacgtcatcgggacacgatgacgtcatcggctaacgatgacgtcatcggactacgatgacgtcatcggtgcggcgcgccatgcttcatcagactct

SEQ ID NO: 8903 - DNA, 185 bp, Artificial Sequence; identical to SEQ ID NO: 8902
  Synthetic polynucleotide

SEQ ID NO: 8904 - DNA, 197 bp, Artificial Sequence
  Synthetic polynucleotide
atcatctcaccttgcctcctgaagggttccgtaactaccctgcagggaggaattaaaatacagagaggaattaaaatactcggaggaattaaaatacgacgaggaattaaaatacctagaggaattaaaatacactgaggaattaaaatactgcgaggaattaaaatacgtaggcgcgccatgcttcatcagactct

SEQ ID NO: 8905 - DNA, 197 bp, Artificial Sequence; identical to SEQ ID NO: 8904
  Synthetic polynucleotide

SEQ ID NO: 8906 - DNA, 186 bp, Artificial Sequence
  Synthetic polynucleotide
atcatctcaccttgcctcctgggcaacaagtaaggcgacctgcaggggggggggggtggtttggggagaggggggggggtggtttggggtcgggggggggggtggtttgggggacggggggggggtggtttggggctaggggggggggtggtttggggactggcgcgccatgcttcatcagactct

SEQ ID NO: 8907 - DNA, 186 bp, Artificial Sequence; identical to SEQ ID NO: 8906
  Synthetic polynucleotide

SEQ ID NO: 8908 - DNA, 172 bp, Artificial Sequence
  Synthetic polynucleotide
atcatctcaccttgcctcctgcacccggtaagttgagtcctgcagggtcagctgtgagagtcagctgtgtcggtcagctgtggacgtcagctgtgctagtcagctgtgactgtcagctgtgtgcgtcagctgtggtagtcagctgtgggcgcgccatgcttcatcagactct

SEQ ID NO: 8909 - DNA, 172 bp, Artificial Sequence; identical to SEQ ID NO: 8908
  Synthetic polynucleotide

SEQ ID NO: 8910 - DNA, 164 bp, Artificial Sequence
  Synthetic polynucleotide
atcatctcaccttgcctcctgatgctgctggccatgcacctgcaggacttcctgtagaacttcctgttcgacttcctgtgacacttcctgtctaacttcctgtactacttcctgttgcacttcctgtgtaacttcctgtggcgcgccatgcttcatcagactct

SEQ ID NO: 8911 - DNA, 164 bp, Artificial Sequence; identical to SEQ ID NO: 8910
  Synthetic polynucleotide

SEQ ID NO: 8912 - DNA, 172 bp, Artificial Sequence
  Synthetic polynucleotide
atcatctcaccttgcctcctgttcgttgtaggcaagcgcctgcagggttaattggcagagttaattggctcggttaattggcgacgttaattggcctagttaattggcactgttaattggctgcgttaattggcgtagttaattggcggcgcgccatgcttcatcagactct

SEQ ID NO: 8913 - DNA, 172 bp, Artificial Sequence; identical to SEQ ID NO: 8912
  Synthetic polynucleotide

SEQ ID NO: 8914 - DNA, 188 bp, Artificial Sequence
  Synthetic polynucleotide
atcatctcaccttgcctcctgctcaaaccctgatagctcctgcaggctcgcaggaagaagactcgcaggaagatcgctcgcaggaagagacctcgcaggaagactactcgcaggaagaactctcgcaggaagatgcctcgcaggaagagtactcgcaggaagaggcgcgccatgcttcatcagactct

SEQ ID NO: 8915 - DNA, 188 bp, Artificial Sequence; identical to SEQ ID NO: 8914
  Synthetic polynucleotide

SEQ ID NO: 8916 - DNA, 172 bp, Artificial Sequence
  Synthetic polynucleotide
atcatctcaccttgcctcctggttggtccgcaacgcatcctgcaggacccaagggaagaacccaagggatcgacccaagggagacacccaagggactaacccaagggaactacccaagggatgcacccaagggagtaacccaagggaggcgcgccatgcttcatcagactct

SEQ ID NO: 8917 - DNA, 172 bp, Artificial Sequence; identical to SEQ ID NO: 8916
  Synthetic polynucleotide

SEQ ID NO: 8918 - DNA, 191 bp, Artificial Sequence
  Synthetic polynucleotide
atcatctcaccttgcctcctgatcaacgccgccagtaacctgcagggtggccaccagggggcgctgtagagtggccaccagggggcgctgttcggtggccaccagggggcgctgtgacgtggccaccagggggcgctgtctagtggccaccagggggcgctgtactggcgcgccatgcttcatcagactct

SEQ ID NO: 8919 - DNA, 191 bp, Artificial Sequence; identical to SEQ ID NO: 8918
  Synthetic polynucleotide

SEQ ID NO: 8920 - DNA, 197 bp, Artificial Sequence
  Synthetic polynucleotide
atcatctcaccttgcctcctgactgcttccctaggctccctgcagggggattcgaacccgggacagagggattcgaacccgggactcggggattcgaacccgggacgacgggattcgaacccgggacctagggattcgaacccgggacactgggattcgaacccgggactgcggcgcgccatgcttcatcagactct

SEQ ID NO: 8921 - DNA, 197 bp, Artificial Sequence; identical to SEQ ID NO: 8920
  Synthetic polynucleotide

SEQ ID NO: 8922 - DNA, 180 bp, Artificial Sequence
  Synthetic polynucleotide
atcatctcaccttgcctcctgcgactgatcggattggacctgcaggattaactacacagaattaactacactcgattaactacacgacattaactacacctaattaactacacactattaactacactgcattaactacacgtaattaactacacggcgcgccatgcttcatcagactct

SEQ ID NO: 8923 - DNA, 180 bp, Artificial Sequence; identical to SEQ ID NO: 8922
  Synthetic polynucleotide

SEQ ID NO: 8924 - DNA, 186 bp, Artificial Sequence
  Synthetic polynucleotide
atcatctcaccttgcctcctgagtacgtgacgaggctgcctgcaggtatagtgccatctggtggccagatatagtgccatctggtggcctcgtatagtgccatctggtggccgactatagtgccatctggtggccctatatagtgccatctggtggccactggcgcgccatgcttcatcagactct

SEQ ID NO: 8925 - DNA, 186 bp, Artificial Sequence; identical to SEQ ID NO: 8924
  Synthetic polynucleotide

SEQ ID NO: 8926 - DNA, 172 bp, Artificial Sequence
  Synthetic polynucleotide
atcatctcaccttgcctcctgtcggttagcgaacgagacctgcagggttaattggaagagttaattggatcggttaattggagacgttaattggactagttaattggaactgttaattggatgcgttaattggagtagttaattggaggcgcgccatgcttcatcagactct

SEQ ID NO: 8927 - DNA, 172 bp, Artificial Sequence; identical to SEQ ID NO: 8926
  Synthetic polynucleotide

SEQ ID NO: 8928 - DNA, 196 bp, Artificial Sequence
  Synthetic polynucleotide
atcatctcaccttgcctcctgtaatcttctacctacggcctgcaggcaaaggtcaagggagacaaaggtcaagggtcgcaaaggtcaaggggaccaaaggtcaagggctacaaaggtcaagggactcaaaggtcaagggtgccaaaggtcaaggggtacaaaggtcaagggggcgcgccatgcttcatcagactct

SEQ ID NO: 8929 - DNA, 196 bp, Artificial Sequence; identical to SEQ ID NO: 8928
  Synthetic polynucleotide

SEQ ID NO: 8930 - DNA, 191 bp, Artificial Sequence
  Synthetic polynucleotide
atcatctcaccttgcctcctgtgaacgatacaaaccctcctgcaggcccggcgccccctggtggccgagacccggcgccccctggtggccgtcgcccggcgccccctggtggccggaccccggcgccccctggtggccgctacccggcgccccctggtggccgactggcgcgccatgcttcatcagactct

SEQ ID NO: 8931 - DNA, 191 bp, Artificial Sequence; identical to SEQ ID NO: 8930
  Synthetic polynucleotide

SEQ ID NO: 8932 - DNA, 148 bp, Artificial Sequence
  Synthetic polynucleotide
atcatctcaccttgcctcctgatcgggaacggaaacgccctgcaggtgtttatagatgtttattcgtgtttatgactgtttatctatgtttatacttgtttattgctgtttatgtatgtttatggcgcgccatgcttcatcagactct

SEQ ID NO: 8933 - DNA, 148 bp, Artificial Sequence; identical to SEQ ID NO: 8932
  Synthetic polynucleotide

SEQ ID NO: 8934 - DNA, 180 bp, Artificial Sequence
  Synthetic polynucleotide
atcatctcaccttgcctcctgatggataacgacaatcgcctgcaggccacctgtcacagaccacctgtcactcgccacctgtcacgacccacctgtcacctaccacctgtcacactccacctgtcactgcccacctgtcacgtaccacctgtcacggcgcgccatgcttcatcagactct

SEQ ID NO: 8935 - DNA, 180 bp, Artificial Sequence; identical to SEQ ID NO: 8934
  Synthetic polynucleotide

SEQ ID NO: 8936 - DNA, 185 bp, Artificial Sequence
  Synthetic polynucleotide
atcatctcaccttgcctcctgaagacgtccaaacttcgcctgcaggcaacccctgggtgtggagacaacccctgggtgtggtcgcaacccctgggtgtgggaccaacccctgggtgtggctacaacccctgggtgtggactcaacccctgggtgtggtgcggcgcgccatgcttcatcagactct

SEQ ID NO: 8937 - DNA, 185 bp, Artificial Sequence; identical to SEQ ID NO: 8936
  Synthetic polynucleotide

SEQ ID NO: 8938 - DNA, 180 bp, Artificial Sequence
  Synthetic polynucleotide
atcatctcaccttgcctcctgtcgcaagcgccttagtccctgcaggaccggaagtacagaaccggaagtactcgaccggaagtacgacaccggaagtacctaaccggaagtacactaccggaagtactgcaccggaagtacgtaaccggaagtacggcgcgccatgcttcatcagactct

SEQ ID NO: 8939 - DNA, 180 bp, Artificial Sequence; identical to SEQ ID NO: 8938
  Synthetic polynucleotide

SEQ ID NO: 8940 - DNA, 191 bp, Artificial Sequence
  Synthetic polynucleotide
atcatctcaccttgcctcctgtgcagactgaacccgtccctgcaggtagaaaaatgccacgaaagatagaaaaatgccacgaatcgtagaaaaatgccacgaagactagaaaaatgccacgaactatagaaaaatgccacgaaacttagaaaaatgccacgaatgcggcgcgccatgcttcatcagactct

SEQ ID NO: 8941 - DNA, 191 bp, Artificial Sequence; identical to SEQ ID NO: 8940
  Synthetic polynucleotide

SEQ ID NO: 8942 - DNA, 197 bp, Artificial Sequence
  Synthetic polynucleotide
atcatctcaccttgcctcctgaaagtatcagctcctaccctgcaggattaccatatatgggcatagaattaccatatatgggcattcgattaccatatatgggcatgacattaccatatatgggcatctaattaccatatatgggcatactattaccatatatgggcattgcggcgcgccatgcttcatcagactct

SEQ ID NO: 8943 - DNA, 197 bp, Artificial Sequence; identical to SEQ ID NO: 8942
  Synthetic polynucleotide

SEQ ID NO: 8944 - DNA, 188 bp, Artificial Sequence
  Synthetic polynucleotide
atcatctcaccttgcctcctgggagcgatcgcagctttcctgcaggtgtcagggggcaagatgtcagggggcatcgtgtcagggggcagactgtcagggggcactatgtcagggggcaacttgtcagggggcatgctgtcagggggcagtatgtcagggggcaggcgcgccatgcttcatcagactct

SEQ ID NO: 8945 - DNA, 188 bp, Artificial Sequence; identical to SEQ ID NO: 8944
  Synthetic polynucleotide

SEQ ID NO: 8946 - DNA, 180 bp, Artificial Sequence
  Synthetic polynucleotide
atcatctcaccttgcctcctgtagaaagtaaggatgtgcctgcaggggccacgcccaagaggccacgcccatcgggccacgcccagacggccacgcccactaggccacgcccaactggccacgcccatgcggccacgcccagtaggccacgcccaggcgcgccatgcttcatcagactct

SEQ ID NO: 8947 - DNA, 180 bp, Artificial Sequence; identical to SEQ ID NO: 8946
  Synthetic polynucleotide

SEQ ID NO: 8948 - DNA, 196 bp, Artificial Sequence
  Synthetic polynucleotide
atcatctcaccttgcctcctgggacgaagttggatggacctgcaggcttttctgggaaaagacttttctgggaaatcgcttttctgggaaagaccttttctgggaaactacttttctgggaaaactcttttctgggaaatgccttttctgggaaagtacttttctgggaaaggcgcgccatgcttcatcagactct

SEQ ID NO: 8949 - DNA, 196 bp, Artificial Sequence; identical to SEQ ID NO: 8948
  Synthetic polynucleotide

SEQ ID NO: 8950 - DNA, 197 bp, Artificial Sequence
  Synthetic polynucleotide
atcatctcaccttgcctcctgcaccattctgttggcatcctgcaggtaattagcgtaattaagataattagcgtaattatcgtaattagcgtaattagactaattagcgtaattactataattagcgtaattaacttaattagcgtaattatgctaattagcgtaattagtaggcgcgccatgcttcatcagactct

SEQ ID NO: 8951 - DNA, 197 bp, Artificial Sequence; identical to SEQ ID NO: 8950
  Synthetic polynucleotide

SEQ ID NO: 8952 - DNA, 148 bp, Artificial Sequence
  Synthetic polynucleotide
atcatctcaccttgcctcctgcaccgaattcgaaatatcctgcaggtgtttacagatgtttactcgtgtttacgactgtttacctatgtttacacttgtttactgctgtttacgtatgtttacggcgcgccatgcttcatcagactct

SEQ ID NO: 8953 - DNA, 148 bp, Artificial Sequence; identical to SEQ ID NO: 8952
  Synthetic polynucleotide

SEQ ID NO: 8954 - DNA, 148 bp, Artificial Sequence
  Synthetic polynucleotide
atcatctcaccttgcctcctgccaccttcatgactgcccctgcaggcattgttagacattgtttcgcattgttgaccattgttctacattgttactcattgtttgccattgttgtacattgttggcgcgccatgcttcatcagactct

SEQ ID NO: 8955 - DNA, 148 bp, Artificial Sequence; identical to SEQ ID NO: 8954
  Synthetic polynucleotide

SEQ ID NO: 8956 - DNA, 197 bp, Artificial Sequence
  Synthetic polynucleotide
atcatctcaccttgcctcctgggcccattaatcatctgcctgcaggttagtttcgattttgagattagtttcgattttgtcgttagtttcgattttggacttagtttcgattttgctattagtttcgattttgactttagtttcgattttgtgcttagtttcgattttggtaggcgcgccatgcttcatcagactct

SEQ ID NO: 8957 - DNA, 197 bp, Artificial Sequence; identical to SEQ ID NO: 8956
  Synthetic polynucleotide

SEQ ID NO: 8958 - DNA, 191 bp, Artificial Sequence
  Synthetic polynucleotide
atcatctcaccttgcctcctgtattgcgcgtgggtgagcctgcaggaaggcgaaatcatcgcaagaaaggcgaaatcatcgcatcgaaggcgaaatcatcgcagacaaggcgaaatcatcgcactaaaggcgaaatcatcgcaactaaggcgaaatcatcgcatgcggcgcgccatgcttcatcagactct

SEQ ID NO: 8959 - DNA, 191 bp, Artificial Sequence; identical to SEQ ID NO: 8958
  Synthetic polynucleotide

SEQ ID NO: 8960 - DNA, 156 bp, Artificial Sequence
  Synthetic polynucleotide
atcatctcaccttgcctcctgtctcactcacgttgttccctgcaggacctgtcaagaacctgtcatcgacctgtcagacacctgtcactaacctgtcaactacctgtcatgcacctgtcagtaacctgtcaggcgcgccatgcttcatcagactct

SEQ ID NO: 8961 - DNA, 156 bp, Artificial Sequence; identical to SEQ ID NO: 8960
  Synthetic polynucleotide

SEQ ID NO: 8962 - DNA, 188 bp, Artificial Sequence
  Synthetic polynucleotide
atcatctcaccttgcctcctgagacaaatcctgtgagtcctgcaggtgtcagggggcgagatgtcagggggcgtcgtgtcagggggcggactgtcagggggcgctatgtcagggggcgacttgtcagggggcgtgctgtcagggggcggtatgtcagggggcgggcgcgccatgcttcatcagactct

SEQ ID NO: 8963 - DNA, 188 bp, Artificial Sequence; identical to SEQ ID NO: 8962
  Synthetic polynucleotide

SEQ ID NO: 8964 - DNA, 191 bp, Artificial Sequence
  Synthetic polynucleotide
atcatctcaccttgcctcctgacccactctaccgcaaacctgcaggattctagaaatttctccagaattctagaaatttctcctcgattctagaaatttctccgacattctagaaatttctccctaattctagaaatttctccactattctagaaatttctcctgcggcgcgccatgcttcatcagactct

SEQ ID NO: 8965 - DNA, 191 bp, Artificial Sequence; identical to SEQ ID NO: 8964
  Synthetic polynucleotide

SEQ ID NO: 8966 - DNA, 164 bp, Artificial Sequence
  Synthetic polynucleotide
atcatctcaccttgcctcctgatctgctgtcccacatccctgcaggaattaattaagaaattaattatcgaattaattagacaattaattactaaattaattaactaattaattatgcaattaattagtaaattaattaggcgcgccatgcttcatcagactct

SEQ ID NO: 8967 - DNA, 164 bp, Artificial Sequence; identical to SEQ ID NO: 8966
  Synthetic polynucleotide

SEQ ID NO: 8968 - DNA, 172 bp, Artificial Sequence
  Synthetic polynucleotide
atcatctcaccttgcctcctgacgcgagctggtatgagcctgcaggccgcccccgcagaccgcccccgctcgccgcccccgcgacccgcccccgcctaccgcccccgcactccgcccccgctgcccgcccccgcgtaccgcccccgcggcgcgccatgcttcatcagactct

SEQ ID NO: 8969 - DNA, 172 bp, Artificial Sequence; identical to SEQ ID NO: 8968
  Synthetic polynucleotide

SEQ ID NO: 8970 - DNA, 172 bp, Artificial Sequence
  Synthetic polynucleotide
atcatctcaccttgcctcctgatcggacaatagccttccctgcaggatgaatatgcagaatgaatatgctcgatgaatatgcgacatgaatatgcctaatgaatatgcactatgaatatgctgcatgaatatgcgtaatgaatatgcggcgcgccatgcttcatcagactct

SEQ ID NO: 8971 - DNA, 172 bp, Artificial Sequence; identical to SEQ ID NO: 8970
  Synthetic polynucleotide

SEQ ID NO: 8972 - DNA, 172 bp, Artificial Sequence
  Synthetic polynucleotide
atcatctcaccttgcctcctggcacgcaatgtatttatcctgcaggtgttctagatagatgttctagattcgtgttctagatgactgttctagatctatgttctagatacttgttctagattgctgttctagatgtatgttctagatggcgcgccatgcttcatcagactct

SEQ ID NO: 8973 - DNA, 172 bp, Artificial Sequence; identical to SEQ ID NO: 8972
  Synthetic polynucleotide

SEQ ID NO: 8974 - DNA, 164 bp, Artificial Sequence
  Synthetic polynucleotide
atcatctcaccttgcctcctgacgccgtcaatttaaaccctgcaggagacaccacagaagacaccactcgagacaccacgacagacaccacctaagacaccacactagacaccactgcagacaccacgtaagacaccacggcgcgccatgcttcatcagactct

SEQ ID NO: 8975 - DNA, 164 bp, Artificial Sequence; identical to SEQ ID NO: 8974
  Synthetic polynucleotide

SEQ ID NO: 8976 - DNA, 172 bp, Artificial Sequence
  Synthetic polynucleotide
atcatctcaccttgcctcctgaaaggccttgccgtagccctgcaggacctttgaccagaacctttgacctcgacctttgaccgacacctttgaccctaacctttgaccactacctttgacctgcacctttgaccgtaacctttgaccggcgcgccatgcttcatcagactct

SEQ ID NO: 8977 - DNA, 172 bp, Artificial Sequence; identical to SEQ ID NO: 8976
  Synthetic polynucleotide

SEQ ID NO: 8978 - DNA, 172 bp, Artificial Sequence
  Synthetic polynucleotide
atcatctcaccttgcctcctgctcatagtgctatgtaacctgcagggttaattggtagagttaattggttcggttaattggtgacgttaattggtctagttaattggtactgttaattggttgcgttaattggtgtagttaattggtggcgcgccatgcttcatcagactct

SEQ ID NO: 8979 - DNA, 172 bp, Artificial Sequence; identical to SEQ ID NO: 8978
  Synthetic polynucleotide

SEQ ID NO: 8980 - DNA, 197 bp, Artificial Sequence
  Synthetic polynucleotide
atcatctcaccttgcctcctgtcttccgtcaatgcggtcctgcaggttggcaatttgccagagattggcaatttgccagtcgttggcaatttgccaggacttggcaatttgccagctattggcaatttgccagactttggcaatttgccagtgcttggcaatttgccaggtaggcgcgccatgcttcatcagactct

SEQ ID NO: 8981 - DNA, 197 bp, Artificial Sequence; identical to SEQ ID NO: 8980
  Synthetic polynucleotide

SEQ ID NO: 8982 - DNA, 148 bp, Artificial Sequence
  Synthetic polynucleotide
atcatctcaccttgcctcctgactctatcaagacaggccctgcaggaatttccagaaatttcctcgaatttccgacaatttccctaaatttccactaatttcctgcaatttccgtaaatttccggcgcgccatgcttcatcagactct

SEQ ID NO: 8983 - DNA, 148 bp, Artificial Sequence; identical to SEQ ID NO: 8982
  Synthetic polynucleotide

SEQ ID NO: 8984 - DNA, 172 bp, Artificial Sequence
  Synthetic polynucleotide
atcatctcaccttgcctcctgcagactcctctaggtgacctgcaggttccccctccagattccccctcctcgttccccctccgacttccccctccctattccccctccactttccccctcctgcttccccctccgtattccccctccggcgcgccatgcttcatcagactct

SEQ ID NO: 8985 - DNA, 172 bp, Artificial Sequence; identical to SEQ ID NO: 8984
  Synthetic polynucleotide

SEQ ID NO: 8986 - DNA, 172 bp, Artificial Sequence
  Synthetic polynucleotide
atcatctcaccttgcctcctgggtagtacgggtacaaccctgcaggagcgccccctagaagcgcccccttcgagcgccccctgacagcgccccctctaagcgccccctactagcgcccccttgcagcgccccctgtaagcgccccctggcgcgccatgcttcatcagactct

SEQ ID NO: 8987 - DNA, 172 bp, Artificial Sequence; identical to SEQ ID NO: 8986
  Synthetic polynucleotide

SEQ ID NO: 8988 - DNA, 197 bp, Artificial Sequence
  Synthetic polynucleotide
atcatctcaccttgcctcctgcgtttaacggaagcaggcctgcaggcagataagaatctgtagacagataagaatctgttcgcagataagaatctgtgaccagataagaatctgtctacagataagaatctgtactcagataagaatctgttgccagataagaatctgtgtaggcgcgccatgcttcatcagactct

SEQ ID NO: 8989 - DNA, 197 bp, Artificial Sequence; identical to SEQ ID NO: 8988
  Synthetic polynucleotide

SEQ ID NO: 8990 - DNA, 191 bp, Artificial Sequence
  Synthetic polynucleotide
atcatctcaccttgcctcctgtaaccagaagtgatcagcctgcaggaaaatacatgtaatactagaaaaatacatgtaatacttcgaaaatacatgtaatactgacaaaatacatgtaatactctaaaaatacatgtaatactactaaaatacatgtaatacttgcggcgcgccatgcttcatcagactct

SEQ ID NO: 8991 - DNA, 191 bp, Artificial Sequence; identical to SEQ ID NO: 8990
  Synthetic polynucleotide

SEQ ID NO: 8992 - DNA, 191 bp, Artificial Sequence
  Synthetic polynucleotide
atcatctcaccttgcctcctgacgggtaattacaatgccctgcaggtccattaattaatggacagatccattaattaatggactcgtccattaattaatggacgactccattaattaatggacctatccattaattaatggacacttccattaattaatggactgcggcgcgccatgcttcatcagactct

SEQ ID NO: 8993 - DNA, 191 bp, Artificial Sequence; identical to SEQ ID NO: 8992
  Synthetic polynucleotide

SEQ ID NO: 8994 - DNA, 156 bp, Artificial Sequence
  Synthetic polynucleotide
atcatctcaccttgcctcctgacgtttgactcgggaaacctgcaggggagttgtagaggagttgttcgggagttgtgacggagttgtctaggagttgtactggagttgttgcggagttgtgtaggagttgtggcgcgccatgcttcatcagactct

SEQ ID NO: 8995 - DNA, 156 bp, Artificial Sequence; identical to SEQ ID NO: 8994
  Synthetic polynucleotide

SEQ ID NO: 8996 - DNA, 172 bp, Artificial Sequence
  Synthetic polynucleotide
atcatctcaccttgcctcctgcgtccgcgtgcatgaaacctgcaggctgacctgaaagactgacctgaatcgctgacctgaagacctgacctgaactactgacctgaaactctgacctgaatgcctgacctgaagtactgacctgaaggcgcgccatgcttcatcagactct

SEQ ID NO: 8997 - DNA, 172 bp, Artificial Sequence; identical to SEQ ID NO: 8996
  Synthetic polynucleotide

SEQ ID NO: 8998 - DNA, 188 bp, Artificial Sequence
  Synthetic polynucleotide
atcatctcaccttgcctcctggatgccattgcttacggcctgcaggcggcagatggccagacggcagatggcctcgcggcagatggccgaccggcagatggccctacggcagatggccactcggcagatggcctgccggcagatggccgtacggcagatggccggcgcgccatgcttcatcagactct

SEQ ID NO: 8999 - DNA, 188 bp, Artificial Sequence; identical to SEQ ID NO: 8998
  Synthetic polynucleotide

SEQ ID NO: 9000 - DNA, 196 bp, Artificial Sequence
  Synthetic polynucleotide
atcatctcaccttgcctcctggtagacatgccaatagtcctgcaggggccagaggtcagagaggccagaggtcagtcgggccagaggtcaggacggccagaggtcagctaggccagaggtcagactggccagaggtcagtgcggccagaggtcaggtaggccagaggtcagggcgcgccatgcttcatcagactct

SEQ ID NO: 9001 - DNA, 196 bp, Artificial Sequence; identical to SEQ ID NO: 9000
  Synthetic polynucleotide

SEQ ID NO: 9002 - DNA, 191 bp, Artificial Sequence
  Synthetic polynucleotide
atcatctcaccttgcctcctgaccttagaggtgctctccctgcaggcgggagggtacattgtgttcttgtgcgagacgggagggtacattgtgttcttgtgcgtcgcgggagggtacattgtgttcttgtgcggaccgggagggtacattgtgttcttgtgcgctaggcgcgccatgcttcatcagactct

SEQ ID NO: 9003 - DNA, 191 bp, Artificial Sequence; identical to SEQ ID NO: 9002
  Synthetic polynucleotide

SEQ ID NO: 9004 - DNA, 180 bp, Artificial Sequence
  Synthetic polynucleotide
atcatctcaccttgcctcctgtaaacttgctctgagctcctgcaggaaaacacctgtagaaaaacacctgttcgaaaacacctgtgacaaaacacctgtctaaaaacacctgtactaaaacacctgttgcaaaacacctgtgtaaaaacacctgtggcgcgccatgcttcatcagactct

SEQ ID NO: 9005 - DNA, 180 bp, Artificial Sequence; identical to SEQ ID NO: 9004
  Synthetic polynucleotide

SEQ ID NO: 9006 - DNA, 191 bp, Artificial Sequence
  Synthetic polynucleotide
atcatctcaccttgcctcctgcgagactgaccacatgtcctgcaggaattttacatgtatataagaaattttacatgtatatatcgaattttacatgtatatagacaattttacatgtatatactaaattttacatgtatataactaattttacatgtatatatgcggcgcgccatgcttcatcagactct

SEQ ID NO: 9007 - DNA, 191 bp, Artificial Sequence; identical to SEQ ID NO: 9006
  Synthetic polynucleotide

SEQ ID NO: 9008 - DNA, 186 bp, Artificial Sequence
  Synthetic polynucleotide
atcatctcaccttgcctcctggaccgcttctattgtaacctgcaggtggggagcagctgcgtccctagatggggagcagctgcgtcccttcgtggggagcagctgcgtccctgactggggagcagctgcgtccctctatggggagcagctgcgtccctactggcgcgccatgcttcatcagactct

SEQ ID NO: 9009 - DNA, 186 bp, Artificial Sequence; identical to SEQ ID NO: 9008
  Synthetic polynucleotide

SEQ ID NO: 9010 - DNA, 180 bp, Artificial Sequence
  Synthetic polynucleotide
atcatctcaccttgcctcctgtccgtcagacatcacggcctgcagggcattaatcaaagagcattaatcaatcggcattaatcaagacgcattaatcaactagcattaatcaaactgcattaatcaatgcgcattaatcaagtagcattaatcaaggcgcgccatgcttcatcagactct

SEQ ID NO: 9011 - DNA, 180 bp, Artificial Sequence; identical to SEQ ID NO: 9010
  Synthetic polynucleotide

SEQ ID NO: 9012 - DNA, 197 bp, Artificial Sequence
  Synthetic polynucleotide
atcatctcaccttgcctcctgggccagattctgctggtcctgcagggggaaagtgaaactgagagggaaagtgaaactgtcggggaaagtgaaactggacgggaaagtgaaactgctagggaaagtgaaactgactgggaaagtgaaactgtgcgggaaagtgaaactggtaggcgcgccatgcttcatcagactct

SEQ ID NO: 9013 - DNA, 197 bp, Artificial Sequence; identical to SEQ ID NO: 9012
  Synthetic polynucleotide

SEQ ID NO: 9014 - DNA, 180 bp, Artificial Sequence
  Synthetic polynucleotide
atcatctcaccttgcctcctgcacctatgatgacctctcctgcagggctaattagccagagctaattagcctcggctaattagccgacgctaattagccctagctaattagccactgctaattagcctgcgctaattagccgtagctaattagccggcgcgccatgcttcatcagactct

SEQ ID NO: 9015 - DNA, 180 bp, Artificial Sequence; identical to SEQ ID NO: 9014
  Synthetic polynucleotide

SEQ ID NO: 9016 - DNA, 156 bp, Artificial Sequence
  Synthetic polynucleotide
atcatctcaccttgcctcctgcgtaatgatgacgtggacctgcaggtacgtcatagatacgtcattcgtacgtcatgactacgtcatctatacgtcatacttacgtcattgctacgtcatgtatacgtcatggcgcgccatgcttcatcagactct

SEQ ID NO: 9017 - DNA, 156 bp, Artificial Sequence; identical to SEQ ID NO: 9016
  Synthetic polynucleotide

SEQ ID NO: 9018 - DNA, 197 bp, Artificial Sequence
  Synthetic polynucleotide
atcatctcaccttgcctcctgaactgaaagcaatgatgcctgcaggtaaaaatgctgacttagataaaaatgctgactttcgtaaaaatgctgacttgactaaaaatgctgacttctataaaaatgctgacttacttaaaaatgctgactttgctaaaaatgctgacttgtaggcgcgccatgcttcatcagactct

SEQ ID NO: 9019 - DNA, 197 bp, Artificial Sequence; identical to SEQ ID NO: 9018
  Synthetic polynucleotide

SEQ ID NO: 9020 - DNA, 185 bp, Artificial Sequence
  Synthetic polynucleotide
atcatctcaccttgcctcctggggaatacacgtccacacctgcaggggattgtttacgtttgagaggattgtttacgtttgtcgggattgtttacgtttggacggattgtttacgtttgctaggattgtttacgtttgactggattgtttacgtttgtgcggcgcgccatgcttcatcagactct

SEQ ID NO: 9021 - DNA, 185 bp, Artificial Sequence; identical to SEQ ID NO: 9020
  Synthetic polynucleotide

SEQ ID NO: 9022 - DNA, 197 bp, Artificial Sequence
  Synthetic polynucleotide
atcatctcaccttgcctcctgtcgctagtcgaaagtcgcctgcaggatcgcgcgcctttatagaatcgcgcgcctttattcgatcgcgcgcctttatgacatcgcgcgcctttatctaatcgcgcgcctttatactatcgcgcgcctttattgcatcgcgcgcctttatgtaggcgcgccatgcttcatcagactct

SEQ ID NO: 9023 - DNA, 197 bp, Artificial Sequence; identical to SEQ ID NO: 9022
  Synthetic polynucleotide

SEQ ID NO: 9024 - DNA, 191 bp, Artificial Sequence
  Synthetic polynucleotide
atcatctcaccttgcctcctgcataaattgcgaatgctcctgcaggataaatgacacctatcaagaataaatgacacctatcatcgataaatgacacctatcagacataaatgacacctatcactaataaatgacacctatcaactataaatgacacctatcatgcggcgcgccatgcttcatcagactct

SEQ ID NO: 9025 - DNA, 191 bp, Artificial Sequence; identical to SEQ ID NO: 9024
  Synthetic polynucleotide

SEQ ID NO: 9026 - DNA, 196 bp, Artificial Sequence
  Synthetic polynucleotide
atcatctcaccttgcctcctgaatgagcggtttacgcacctgcaggaacttaccaaacaagaaacttaccaaacatcgaacttaccaaacagacaacttaccaaacactaaacttaccaaacaactaacttaccaaacatgcaacttaccaaacagtaaacttaccaaacaggcgcgccatgcttcatcagactct

SEQ ID NO: 9027 - DNA, 196 bp, Artificial Sequence; identical to SEQ ID NO: 9026
  Synthetic polynucleotide

SEQ ID NO: 9028 - DNA, 186 bp, Artificial Sequence
  Synthetic polynucleotide
atcatctcaccttgcctcctggctcgtcctagtttagccctgcaggtcctctttgtttacaattcaagatcctctttgtttacaattcatcgtcctctttgtttacaattcagactcctctttgtttacaattcactatcctctttgtttacaattcaactggcgcgccatgcttcatcagactct

SEQ ID NO: 9029 - DNA, 186 bp, Artificial Sequence; identical to SEQ ID NO: 9028
  Synthetic polynucleotide

SEQ ID NO: 9030 - DNA, 185 bp, Artificial Sequence
  Synthetic polynucleotide
atcatctcaccttgcctcctggttaagtatacgttggtcctgcaggaaatgcgtgggcgtaaagaaaatgcgtgggcgtaatcgaaatgcgtgggcgtaagacaaatgcgtgggcgtaactaaaatgcgtgggcgtaaactaaatgcgtgggcgtaatgcggcgcgccatgcttcatcagactct

SEQ ID NO: 9031 - DNA, 185 bp, Artificial Sequence; identical to SEQ ID NO: 9030
  Synthetic polynucleotide

SEQ ID NO: 9032 - DNA, 196 bp, Artificial Sequence
  Synthetic polynucleotide
atcatctcaccttgcctcctggcgtgatgcaacgatgtcctgcaggatgaattgcagtcagaatgaattgcagtctcgatgaattgcagtcgacatgaattgcagtcctaatgaattgcagtcactatgaattgcagtctgcatgaattgcagtcgtaatgaattgcagtcggcgcgccatgcttcatcagactct

SEQ ID NO: 9033 - DNA, 196 bp, Artificial Sequence; identical to SEQ ID NO: 9032
  Synthetic polynucleotide

SEQ ID NO: 9034 - DNA, 191 bp, Artificial Sequence
  Synthetic polynucleotide
atcatctcaccttgcctcctgttgaccctaccacgcaacctgcaggtaagccacgccccctttagataagccacgcccccttttcgtaagccacgccccctttgactaagccacgccccctttctataagccacgccccctttacttaagccacgcccccttttgcggcgcgccatgcttcatcagactct

SEQ ID NO: 9035 - DNA, 191 bp, Artificial Sequence; identical to SEQ ID NO: 9034
  Synthetic polynucleotide

SEQ ID NO: 9036 - DNA, 191 bp, Artificial Sequence
  Synthetic polynucleotide
atcatctcaccttgcctcctgagggcactacaggccaacctgcaggaatagggtatcaatattagaaatagggtatcaatatttcgaatagggtatcaatattgacaatagggtatcaatattctaaatagggtatcaatattactaatagggtatcaatatttgcggcgcgccatgcttcatcagactct

SEQ ID NO: 9037 - DNA, 191 bp, Artificial Sequence; identical to SEQ ID NO: 9036
  Synthetic polynucleotide

SEQ ID NO: 9038 - DNA, 186 bp, Artificial Sequence
  Synthetic polynucleotide
atcatctcaccttgcctcctggcaccacctatataggccctgcaggttatttgtgttgttttttatagattatttgtgttgttttttattcgttatttgtgttgttttttatgacttatttgtgttgttttttatctattatttgtgttgttttttatactggcgcgccatgcttcatcagactct

SEQ ID NO: 9039 - DNA, 186 bp, Artificial Sequence; identical to SEQ ID NO: 9038
  Synthetic polynucleotide

SEQ ID NO: 9040 - DNA, 156 bp, Artificial Sequence
  Synthetic polynucleotide
atcatctcaccttgcctcctgcgcaaagtgtaaccgtgcctgcagggtcacgtgagagtcacgtgtcggtcacgtggacgtcacgtgctagtcacgtgactgtcacgtgtgcgtcacgtggtagtcacgtgggcgcgccatgcttcatcagactct

SEQ ID NO: 9041 - DNA, 156 bp, Artificial Sequence; identical to SEQ ID NO: 9040
  Synthetic polynucleotide

SEQ ID NO: 9042 - DNA, 188 bp, Artificial Sequence
  Synthetic polynucleotide
atcatctcaccttgcctcctgtataaaccttagtcggtcctgcaggtgccctggggcaagatgccctggggcatcgtgccctggggcagactgccctggggcactatgccctggggcaacttgccctggggcatgctgccctggggcagtatgccctggggcaggcgcgccatgcttcatcagactct

SEQ ID NO: 9043 - DNA, 188 bp, Artificial Sequence; identical to SEQ ID NO: 9042
  Synthetic polynucleotide

SEQ ID NO: 9044 - DNA, 191 bp, Artificial Sequence
  Synthetic polynucleotide
atcatctcaccttgcctcctgccgttaaatttgcagttcctgcaggaattattaattaactcgagaaattattaattaactcgtcgaattattaattaactcggacaattattaattaactcgctaaattattaattaactcgactaattattaattaactcgtgcggcgcgccatgcttcatcagactct

SEQ ID NO: 9045 - DNA, 191 bp, Artificial Sequence; identical to SEQ ID NO: 9044
  Synthetic polynucleotide

SEQ ID NO: 9046 - DNA, 180 bp, Artificial Sequence
  Synthetic polynucleotide
atcatctcaccttgcctcctgcctcgtagaccaaactgcctgcaggttaacggttttagattaacggtttttcgttaacggttttgacttaacggttttctattaacggttttactttaacggtttttgcttaacggttttgtattaacggttttggcgcgccatgcttcatcagactct

SEQ ID NO: 9047 - DNA, 180 bp, Artificial Sequence; identical to SEQ ID NO: 9046
  Synthetic polynucleotide

SEQ ID NO: 9048 - DNA, 148 bp, Artificial Sequence
  Synthetic polynucleotide
atcatctcaccttgcctcctggtctttcttattacacccctgcaggaaatcaaagaaaatcaatcgaaatcaagacaaatcaactaaaatcaaactaaatcaatgcaaatcaagtaaaatcaaggcgcgccatgcttcatcagactct

SEQ ID NO: 9049 - DNA, 148 bp, Artificial Sequence; identical to SEQ ID NO: 9048
  Synthetic polynucleotide

SEQ ID NO: 9050 - DNA, 172 bp, Artificial Sequence
  Synthetic polynucleotide
atcatctcaccttgcctcctgatattaacagcccaagacctgcaggtttaattagtagatttaattagttcgtttaattagtgactttaattagtctatttaattagtacttttaattagttgctttaattagtgtatttaattagtggcgcgccatgcttcatcagactct

SEQ ID NO: 9051 - DNA, 172 bp, Artificial Sequence; identical to SEQ ID NO: 9050
  Synthetic polynucleotide

SEQ ID NO: 9052 - DNA, 164 bp, Artificial Sequence
  Synthetic polynucleotide
atcatctcaccttgcctcctggtactagggaatcacaacctgcaggcgcgcgcacagacgcgcgcactcgcgcgcgcacgaccgcgcgcacctacgcgcgcacactcgcgcgcactgccgcgcgcacgtacgcgcgcacggcgcgccatgcttcatcagactct

SEQ ID NO: 9053 - DNA, 164 bp, Artificial Sequence; identical to SEQ ID NO: 9052
  Synthetic polynucleotide

SEQ ID NO: 9054 - DNA, 191 bp, Artificial Sequence
  Synthetic polynucleotide
atcatctcaccttgcctcctgggcatcacgttctgacgcctgcaggaaggtcagtcaaggtcaagaaaggtcagtcaaggtcatcgaaggtcagtcaaggtcagacaaggtcagtcaaggtcactaaaggtcagtcaaggtcaactaaggtcagtcaaggtcatgcggcgcgccatgcttcatcagactct

SEQ ID NO: 9055 - DNA, 191 bp, Artificial Sequence; identical to SEQ ID NO: 9054
  Synthetic polynucleotide

SEQ ID NO: 9056 - DNA, 188 bp, Artificial Sequence
  Synthetic polynucleotide
atcatctcaccttgcctcctggatcatcagtgctagtgcctgcaggaaacaaacattcagaaaacaaacattctcgaaacaaacattcgacaaacaaacattcctaaaacaaacattcactaaacaaacattctgcaaacaaacattcgtaaaacaaacattcggcgcgccatgcttcatcagactct

SEQ ID NO: 9057 - DNA, 188 bp, Artificial Sequence; identical to SEQ ID NO: 9056
  Synthetic polynucleotide

SEQ ID NO: 9058 - DNA, 172 bp, Artificial Sequence
  Synthetic polynucleotide
atcatctcaccttgcctcctgccgtccaatcttcagcccctgcaggtttaattagaagatttaattagatcgtttaattagagactttaattagactatttaattagaacttttaattagatgctttaattagagtatttaattagaggcgcgccatgcttcatcagactct

SEQ ID NO: 9059 - DNA, 172 bp, Artificial Sequence; identical to SEQ ID NO: 9058
  Synthetic polynucleotide

SEQ ID NO: 9060 - DNA, 191 bp, Artificial Sequence
  Synthetic polynucleotide
atcatctcaccttgcctcctgccgaaacacctactgaacctgcagggagcattaattaaggcaagagagcattaattaaggcatcggagcattaattaaggcagacgagcattaattaaggcactagagcattaattaaggcaactgagcattaattaaggcatgcggcgcgccatgcttcatcagactct

SEQ ID NO: 9061 - DNA, 191 bp, Artificial Sequence; identical to SEQ ID NO: 9060
  Synthetic polynucleotide

SEQ ID NO: 9062 - DNA, 200 bp, Artificial Sequence
  Synthetic polynucleotide
atcatctcaccttgcctcctgccaacggaagcataactcctgcaggcaaaagcaatcaaccgtgaagacaaaagcaatcaaccgtgatcgcaaaagcaatcaaccgtgagaccaaaagcaatcaaccgtgactacaaaagcaatcaaccgtgaactcaaaagcaatcaaccgtgaggcgcgccatgcttcatcagactct

SEQ ID NO: 9063 - DNA, 200 bp, Artificial Sequence; identical to SEQ ID NO: 9062
  Synthetic polynucleotide

SEQ ID NO: 9064 - DNA, 197 bp, Artificial Sequence
  Synthetic polynucleotide
atcatctcaccttgcctcctgacatgacaagaaggaatcctgcagggtgcgtgggcgggggagagtgcgtgggcgggggtcggtgcgtgggcggggggacgtgcgtgggcgggggctagtgcgtgggcgggggactgtgcgtgggcgggggtgcgtgcgtgggcggggggtaggcgcgccatgcttcatcagactct

SEQ ID NO: 9065 - DNA, 197 bp, Artificial Sequence; identical to SEQ ID NO: 9064
  Synthetic polynucleotide

SEQ ID NO: 9066 - DNA, 180 bp, Artificial Sequence
  Synthetic polynucleotide
atcatctcaccttgcctcctgatgccagtgactagacccctgcagggaaatgagtcaagagaaatgagtcatcggaaatgagtcagacgaaatgagtcactagaaatgagtcaactgaaatgagtcatgcgaaatgagtcagtagaaatgagtcaggcgcgccatgcttcatcagactct

SEQ ID NO: 9067 - DNA, 180 bp, Artificial Sequence; identical to SEQ ID NO: 9066
  Synthetic polynucleotide

SEQ ID NO: 9068 - DNA, 180 bp, Artificial Sequence
  Synthetic polynucleotide
atcatctcaccttgcctcctgttcaactgccaaacgaccctgcaggagttaagtggaagaagttaagtggatcgagttaagtggagacagttaagtggactaagttaagtggaactagttaagtggatgcagttaagtggagtaagttaagtggaggcgcgccatgcttcatcagactct

SEQ ID NO: 9069 - DNA, 180 bp, Artificial Sequence; identical to SEQ ID NO: 9068
  Synthetic polynucleotide

SEQ ID NO: 9070 - DNA, 164 bp, Artificial Sequence
  Synthetic polynucleotide
atcatctcaccttgcctcctgtagcatagtgtcctgaacctgcaggatttgaattagaatttgaatttcgatttgaattgacatttgaattctaatttgaattactatttgaatttgcatttgaattgtaatttgaattggcgcgccatgcttcatcagactct

SEQ ID NO: 9071 - DNA, 164 bp, Artificial Sequence; identical to SEQ ID NO: 9070
  Synthetic polynucleotide

SEQ ID NO: 9072 - DNA, 188 bp, Artificial Sequence
  Synthetic polynucleotide
atcatctcaccttgcctcctggtgggtacattgaccctcctgcaggacatcaatcaaaagaacatcaatcaaatcgacatcaatcaaagacacatcaatcaaactaacatcaatcaaaactacatcaatcaaatgcacatcaatcaaagtaacatcaatcaaaggcgcgccatgcttcatcagactct

SEQ ID NO: 9073 - DNA, 188 bp, Artificial Sequence; identical to SEQ ID NO: 9072
  Synthetic polynucleotide

SEQ ID NO: 9074 - DNA, 172 bp, Artificial Sequence
  Synthetic polynucleotide
atcatctcaccttgcctcctggttagtgatttgagcttcctgcaggtttaattaggagatttaattaggtcgtttaattagggactttaattaggctatttaattaggacttttaattaggtgctttaattagggtatttaattaggggcgcgccatgcttcatcagactct

SEQ ID NO: 9075 - DNA, 172 bp, Artificial Sequence; identical to SEQ ID NO: 9074
  Synthetic polynucleotide

SEQ ID NO: 9076 - DNA, 148 bp, Artificial Sequence
  Synthetic polynucleotide
atcatctcaccttgcctcctggaaaccgtgtccgattccctgcaggcacttgaagacacttgatcgcacttgagaccacttgactacacttgaactcacttgatgccacttgagtacacttgaggcgcgccatgcttcatcagactct

SEQ ID NO: 9077 - DNA, 148 bp, Artificial Sequence; identical to SEQ ID NO: 9076
  Synthetic polynucleotide

SEQ ID NO: 9078 - DNA, 179 bp, Artificial Sequence
  Synthetic polynucleotide
atcatctcaccttgcctcctggttctggttatatcgtgcctgcaggaaaaaataaatcacagcatatgccagaaaaaaataaatcacagcatatgcctcgaaaaaataaatcacagcatatgccgacaaaaaataaatcacagcatatgccctaggcgcgccatgcttcatcagactct

SEQ ID NO: 9079 - DNA, 179 bp, Artificial Sequence; identical to SEQ ID NO: 9078
  Synthetic polynucleotide

SEQ ID NO: 9080 - DNA, 185 bp, Artificial Sequence
  Synthetic polynucleotide
atcatctcaccttgcctcctggggagctggagctctatcctgcagggttcattttggatggcagagttcattttggatggctcggttcattttggatggcgacgttcattttggatggcctagttcattttggatggcactgttcattttggatggctgcggcgcgccatgcttcatcagactct

SEQ ID NO: 9081 - DNA, 185 bp, Artificial Sequence; identical to SEQ ID NO: 9080
  Synthetic polynucleotide

SEQ ID NO: 9082 - DNA, 197 bp, Artificial Sequence
  Synthetic polynucleotide
atcatctcaccttgcctcctgacttggtggtacgctaacctgcaggtttttgttatgcaaaagatttttgttatgcaaatcgtttttgttatgcaaagactttttgttatgcaaactatttttgttatgcaaaacttttttgttatgcaaatgctttttgttatgcaaagtaggcgcgccatgcttcatcagactct

SEQ ID NO: 9083 - DNA, 197 bp, Artificial Sequence; identical to SEQ ID NO: 9082
  Synthetic polynucleotide

SEQ ID NO: 9084 - DNA, 185 bp, Artificial Sequence
  Synthetic polynucleotide
atcatctcaccttgcctcctgtgcacctgggcctttaccctgcaggaaatgcgtgggcgtatagaaaatgcgtgggcgtattcgaaatgcgtgggcgtatgacaaatgcgtgggcgtatctaaaatgcgtgggcgtatactaaatgcgtgggcgtattgcggcgcgccatgcttcatcagactct

SEQ ID NO: 9085 - DNA, 185 bp, Artificial Sequence; identical to SEQ ID NO: 9084
  Synthetic polynucleotide

SEQ ID NO: 9086 - DNA, 186 bp, Artificial Sequence
  Synthetic polynucleotide
atcatctcaccttgcctcctgataacgccaggcgatttcctgcaggccgcggccatcttggctgctagaccgcggccatcttggctgcttcgccgcggccatcttggctgctgacccgcggccatcttggctgctctaccgcggccatcttggctgctactggcgcgccatgcttcatcagactct

SEQ ID NO: 9087 - DNA, 186 bp, Artificial Sequence; identical to SEQ ID NO: 9086
  Synthetic polynucleotide

SEQ ID NO: 9088 - DNA, 188 bp, Artificial Sequence
  Synthetic polynucleotide
atcatctcaccttgcctcctgcagagatactgtgcagacctgcaggaaataaacaataagaaaataaacaatatcgaaataaacaatagacaaataaacaatactaaaataaacaataactaaataaacaatatgcaaataaacaatagtaaaataaacaataggcgcgccatgcttcatcagactct

SEQ ID NO: 9089 - DNA, 188 bp, Artificial Sequence; identical to SEQ ID NO: 9088
  Synthetic polynucleotide

SEQ ID NO: 9090 - DNA, 198 bp, Artificial Sequence
  Synthetic polynucleotide
atcatctcaccttgcctcctgcaccctgacttcttcctcctgcagggaataatgcgtgggcggcatctgagagaataatgcgtgggcggcatctgtcggaataatgcgtgggcggcatctggacgaataatgcgtgggcggcatctgctagaataatgcgtgggcggcatctgggcgcgccatgcttcatcagactct

SEQ ID NO: 9091 - DNA, 198 bp, Artificial Sequence; identical to SEQ ID NO: 9090
  Synthetic polynucleotide

SEQ ID NO: 9092 - DNA, 197 bp, Artificial Sequence
  Synthetic polynucleotide
atcatctcaccttgcctcctgaatcgactccggcacatcctgcagggggtccaaaggtcaaagagggtccaaaggtcaatcggggtccaaaggtcaagacgggtccaaaggtcaactagggtccaaaggtcaaactgggtccaaaggtcaatgcgggtccaaaggtcaagtaggcgcgccatgcttcatcagactct

SEQ ID NO: 9093 - DNA, 197 bp, Artificial Sequence; identical to SEQ ID NO: 9092
  Synthetic polynucleotide

SEQ ID NO: 9094 - DNA, 156 bp, Artificial Sequence
  Synthetic polynucleotide
atcatctcaccttgcctcctgtgagtgttatccactctcctgcaggtgggcggtagatgggcggttcgtgggcggtgactgggcggtctatgggcggtacttgggcggttgctgggcggtgtatgggcggtggcgcgccatgcttcatcagactct

SEQ ID NO: 9095 - DNA, 156 bp, Artificial Sequence; identical to SEQ ID NO: 9094
  Synthetic polynucleotide

SEQ ID NO: 9096 - DNA, 197 bp, Artificial Sequence
  Synthetic polynucleotide
atcatctcaccttgcctcctgcgccaactctacaaagccctgcagggctgaccttgaacttagagctgaccttgaactttcggctgaccttgaacttgacgctgaccttgaacttctagctgaccttgaacttactgctgaccttgaactttgcgctgaccttgaacttgtaggcgcgccatgcttcatcagactct

SEQ ID NO: 9097 - DNA, 197 bp, Artificial Sequence; identical to SEQ ID NO: 9096
  Synthetic polynucleotide

SEQ ID NO: 9098 - DNA, 196 bp, Artificial Sequence
  Synthetic polynucleotide
atcatctcaccttgcctcctgcttgcgatacggaacgccctgcaggggcgggtacagggtgttcttatagaggcgggtacagggtgttcttattcgggcgggtacagggtgttcttatgacggcgggtacagggtgttcttatctaggcgggtacagggtgttcttatactggcgcgccatgcttcatcagactct

SEQ ID NO: 9099 - DNA, 196 bp, Artificial Sequence; identical to SEQ ID NO: 9098
  Synthetic polynucleotide

SEQ ID NO: 9100 - DNA, 196 bp, Artificial Sequence
  Synthetic polynucleotide
atcatctcaccttgcctcctggctttaacatggaaggccctgcaggcggagagggggagggggggggcagacggagagggggagggggggggctcgcggagagggggagggggggggcgaccggagagggggagggggggggcctacggagagggggagggggggggcactggcgcgccatgcttcatcagactct

SEQ ID NO: 9101 - DNA, 196 bp, Artificial Sequence; identical to SEQ ID NO: 9100
  Synthetic polynucleotide

SEQ ID NO: 9102 - DNA, 188 bp, Artificial Sequence
  Synthetic polynucleotide
atcatctcaccttgcctcctgaggagaacacctggatgcctgcaggtctatgctaattagatctatgctaatttcgtctatgctaattgactctatgctaattctatctatgctaattacttctatgctaatttgctctatgctaattgtatctatgctaattggcgcgccatgcttcatcagactct

SEQ ID NO: 9103 - DNA, 188 bp, Artificial Sequence; identical to SEQ ID NO: 9102
  Synthetic polynucleotide

SEQ ID NO: 9104 - DNA, 186 bp, Artificial Sequence
  Synthetic polynucleotide
atcatctcaccttgcctcctgagctgagggtttcgagtcctgcaggcccccccccccgcccacgcaagacccccccccccgcccacgcatcgcccccccccccgcccacgcagaccccccccccccgcccacgcactacccccccccccgcccacgcaactggcgcgccatgcttcatcagactct

SEQ ID NO: 9105 - DNA, 186 bp, Artificial Sequence; identical to SEQ ID NO: 9104
  Synthetic polynucleotide

SEQ ID NO: 9106 - DNA, 156 bp, Artificial Sequence
  Synthetic polynucleotide
atcatctcaccttgcctcctgtgaagtggatttggatgcctgcagggtcagcaaagagtcagcaatcggtcagcaagacgtcagcaactagtcagcaaactgtcagcaatgcgtcagcaagtagtcagcaaggcgcgccatgcttcatcagactct

SEQ ID NO: 9107 - DNA, 156 bp, Artificial Sequence; identical to SEQ ID NO: 9106
  Synthetic polynucleotide

SEQ ID NO: 9108 - DNA, 172 bp, Artificial Sequence
  Synthetic polynucleotide
atcatctcaccttgcctcctgcggtcgcaatcgcacaacctgcaggcattgttcttagacattgttctttcgcattgttcttgaccattgttcttctacattgttcttactcattgttctttgccattgttcttgtacattgttcttggcgcgccatgcttcatcagactct

SEQ ID NO: 9109 - DNA, 172 bp, Artificial Sequence; identical to SEQ ID NO: 9108
  Synthetic polynucleotide

SEQ ID NO: 9110 - DNA, 172 bp, Artificial Sequence
  Synthetic polynucleotide
atcatctcaccttgcctcctgcaataagcgtgttcttccctgcaggttgacctttgagattgacctttgtcgttgacctttggacttgacctttgctattgacctttgactttgacctttgtgcttgacctttggtattgacctttgggcgcgccatgcttcatcagactct

SEQ ID NO: 9111 - DNA, 172 bp, Artificial Sequence; identical to SEQ ID NO: 9110
  Synthetic polynucleotide

SEQ ID NO: 9112 - DNA, 180 bp, Artificial Sequence
  Synthetic polynucleotide
atcatctcaccttgcctcctgccggtactgtcagttgacctgcaggtctcacctgaaagatctcacctgaatcgtctcacctgaagactctcacctgaactatctcacctgaaacttctcacctgaatgctctcacctgaagtatctcacctgaaggcgcgccatgcttcatcagactct

SEQ ID NO: 9113 - DNA, 180 bp, Artificial Sequence; identical to SEQ ID NO: 9112
  Synthetic polynucleotide

SEQ ID NO: 9114 - DNA, 197 bp, Artificial Sequence
  Synthetic polynucleotide
atcatctcaccttgcctcctgtgagtaggcgtcaccgtcctgcaggggcctgcgggcacccctcagaggcctgcgggcacccctctcgggcctgcgggcacccctcgacggcctgcgggcacccctcctaggcctgcgggcacccctcactggcctgcgggcacccctctgcggcgcgccatgcttcatcagactct

SEQ ID NO: 9115 - DNA, 197 bp, Artificial Sequence; identical to SEQ ID NO: 9114
  Synthetic polynucleotide

SEQ ID NO: 9116 - DNA, 197 bp, Artificial Sequence
  Synthetic polynucleotide
atcatctcaccttgcctcctgtttcattattccgtgtgcctgcaggttcattgtttgcttagtcagattcattgtttgcttagtctcgttcattgtttgcttagtcgacttcattgtttgcttagtcctattcattgtttgcttagtcactttcattgtttgcttagtctgcggcgcgccatgcttcatcagactct

SEQ ID NO: 9117 - DNA, 197 bp, Artificial Sequence; identical to SEQ ID NO: 9116
  Synthetic polynucleotide

SEQ ID NO: 9118 - DNA, 164 bp, Artificial Sequence
  Synthetic polynucleotide
atcatctcaccttgcctcctgcgatcgtagttcgcgaacctgcaggtaacggtcaagataacggtcatcgtaacggtcagactaacggtcactataacggtcaacttaacggtcatgctaacggtcagtataacggtcaggcgcgccatgcttcatcagactct

SEQ ID NO: 9119 - DNA, 164 bp, Artificial Sequence; identical to SEQ ID NO: 9118
  Synthetic polynucleotide

SEQ ID NO: 9120 - DNA, 164 bp, Artificial Sequence
  Synthetic polynucleotide
atcatctcaccttgcctcctgctcgtcggttagtattgcctgcaggattgcacaaagaattgcacaatcgattgcacaagacattgcacaactaattgcacaaactattgcacaatgcattgcacaagtaattgcacaaggcgcgccatgcttcatcagactct

SEQ ID NO: 9121 - DNA, 164 bp, Artificial Sequence; identical to SEQ ID NO: 9120
  Synthetic polynucleotide

SEQ ID NO: 9122 - DNA, 156 bp, Artificial Sequence
  Synthetic polynucleotide
atcatctcaccttgcctcctgctaattagagatccggccctgcagggatgacgtagagatgacgttcggatgacgtgacgatgacgtctagatgacgtactgatgacgttgcgatgacgtgtagatgacgtggcgcgccatgcttcatcagactct

SEQ ID NO: 9123 - DNA, 156 bp, Artificial Sequence; identical to SEQ ID NO: 9122
  Synthetic polynucleotide

SEQ ID NO: 9124 - DNA, 185 bp, Artificial Sequence
  Synthetic polynucleotide
atcatctcaccttgcctcctgaatgctgccgtttccgacctgcaggaaacctcgtaaaatttagaaaacctcgtaaaattttcgaaacctcgtaaaatttgacaaacctcgtaaaatttctaaaacctcgtaaaatttactaaacctcgtaaaattttgcggcgcgccatgcttcatcagactct

SEQ ID NO: 9125 - DNA, 185 bp, Artificial Sequence; identical to SEQ ID NO: 9124
  Synthetic polynucleotide

SEQ ID NO: 9126 - DNA, 190 bp, Artificial Sequence
  Synthetic polynucleotide
atcatctcaccttgcctcctggcaggctgaatgatctgcctgcaggaagtcaataagtcaagaaagtcaataagtcatcgaagtcaataagtcagacaagtcaataagtcactaaagtcaataagtcaactaagtcaataagtcatgcaagtcaataagtcagtaggcgcgccatgcttcatcagactct

SEQ ID NO: 9127 - DNA, 190 bp, Artificial Sequence; identical to SEQ ID NO: 9126
  Synthetic polynucleotide

SEQ ID NO: 9128 - DNA, 188 bp, Artificial Sequence
  Synthetic polynucleotide
atcatctcaccttgcctcctgaccattctgtccgaggccctgcagggctggggatttcagagctggggatttctcggctggggatttcgacgctggggatttcctagctggggatttcactgctggggatttctgcgctggggatttcgtagctggggatttcggcgcgccatgcttcatcagactct

SEQ ID NO: 9129 - DNA, 188 bp, Artificial Sequence; identical to SEQ ID NO: 9128
  Synthetic polynucleotide

SEQ ID NO: 9130 - DNA, 188 bp, Artificial Sequence
  Synthetic polynucleotide
atcatctcaccttgcctcctgtacatggcaactactatcctgcaggaatgtaaacataagaaatgtaaacatatcgaatgtaaacatagacaatgtaaacatactaaatgtaaacataactaatgtaaacatatgcaatgtaaacatagtaaatgtaaacataggcgcgccatgcttcatcagactct

SEQ ID NO: 9131 - DNA, 188 bp, Artificial Sequence; identical to SEQ ID NO: 9130
  Synthetic polynucleotide

SEQ ID NO: 9132 - DNA, 164 bp, Artificial Sequence
  Synthetic polynucleotide
atcatctcaccttgcctcctgacggcatgtgtcattcacctgcaggtaacggtcgagataacggtcgtcgtaacggtcggactaacggtcgctataacggtcgacttaacggtcgtgctaacggtcggtataacggtcgggcgcgccatgcttcatcagactct

SEQ ID NO: 9133 - DNA, 164 bp, Artificial Sequence; identical to SEQ ID NO: 9132
  Synthetic polynucleotide

SEQ ID NO: 9134 - DNA, 186 bp, Artificial Sequence
  Synthetic polynucleotide
atcatctcaccttgcctcctggatagtttcctatggtacctgcagggatttcccataatgccttgcagagatttcccataatgccttgctcggatttcccataatgccttgcgacgatttcccataatgccttgcctagatttcccataatgccttgcactggcgcgccatgcttcatcagactct

SEQ ID NO: 9135 - DNA, 186 bp, Artificial Sequence; identical to SEQ ID NO: 9134
  Synthetic polynucleotide

SEQ ID NO: 9136 - DNA, 180 bp, Artificial Sequence
  Synthetic polynucleotide
atcatctcaccttgcctcctgtagctcacccagcggatcctgcagggatcacgtgacagagatcacgtgactcggatcacgtgacgacgatcacgtgacctagatcacgtgacactgatcacgtgactgcgatcacgtgacgtagatcacgtgacggcgcgccatgcttcatcagactct

SEQ ID NO: 9137 - DNA, 180 bp, Artificial Sequence; identical to SEQ ID NO: 9136
  Synthetic polynucleotide

SEQ ID NO: 9138 - DNA, 172 bp, Artificial Sequence
  Synthetic polynucleotide
atcatctcaccttgcctcctgttatcatcggaggcatacctgcagggcgggggcggagagcgggggcggtcggcgggggcgggacgcgggggcggctagcgggggcggactgcgggggcggtgcgcgggggcgggtagcgggggcggggcgcgccatgcttcatcagactct

SEQ ID NO: 9139 - DNA, 172 bp, Artificial Sequence; identical to SEQ ID NO: 9138
  Synthetic polynucleotide

SEQ ID NO: 9140 - DNA, 156 bp, Artificial Sequence
  Synthetic polynucleotide
atcatctcaccttgcctcctgatggcaaggcttacacgcctgcaggaccacgtgagaaccacgtgtcgaccacgtggacaccacgtgctaaccacgtgactaccacgtgtgcaccacgtggtaaccacgtgggcgcgccatgcttcatcagactct

SEQ ID NO: 9141 - DNA, 156 bp, Artificial Sequence; identical to SEQ ID NO: 9140
  Synthetic polynucleotide

SEQ ID NO: 9142 - DNA, 191 bp, Artificial Sequence
  Synthetic polynucleotide
atcatctcaccttgcctcctgtcagctcttcagaaggtcctgcaggttttatgtgcacatgtaagattttatgtgcacatgtatcgttttatgtgcacatgtagacttttatgtgcacatgtactattttatgtgcacatgtaactttttatgtgcacatgtatgcggcgcgccatgcttcatcagactct

SEQ ID NO: 9143 - DNA, 191 bp, Artificial Sequence; identical to SEQ ID NO: 9142
  Synthetic polynucleotide

SEQ ID NO: 9144 - DNA, 164 bp, Artificial Sequence
  Synthetic polynucleotide
atcatctcaccttgcctcctgctgaataatagacctaccctgcaggttgagtcatagattgagtcattcgttgagtcatgacttgagtcatctattgagtcatactttgagtcattgcttgagtcatgtattgagtcatggcgcgccatgcttcatcagactct

SEQ ID NO: 9145 - DNA, 164 bp, Artificial Sequence; identical to SEQ ID NO: 9144
  Synthetic polynucleotide

SEQ ID NO: 9146 - DNA, 190 bp, Artificial Sequence
  Synthetic polynucleotide
atcatctcaccttgcctcctgagatagccacctcagcacctgcaggccgtcacgtgaccaagaccgtcacgtgaccatcgccgtcacgtgaccagacccgtcacgtgaccactaccgtcacgtgaccaactccgtcacgtgaccatgcccgtcacgtgaccagtaggcgcgccatgcttcatcagactct

SEQ ID NO: 9147 - DNA, 190 bp, Artificial Sequence; identical to SEQ ID NO: 9146
  Synthetic polynucleotide

SEQ ID NO: 9148 - DNA, 180 bp, Artificial Sequence
  Synthetic polynucleotide
atcatctcaccttgcctcctgtgaatgcgtttcaacttcctgcaggaactatcgataagaaactatcgatatcgaactatcgatagacaactatcgatactaaactatcgataactaactatcgatatgcaactatcgatagtaaactatcgataggcgcgccatgcttcatcagactct

SEQ ID NO: 9149 - DNA, 180 bp, Artificial Sequence; identical to SEQ ID NO: 9148
  Synthetic polynucleotide

SEQ ID NO: 9150 - DNA, 196 bp, Artificial Sequence
  Synthetic polynucleotide
atcatctcaccttgcctcctgtcgtacaatacagacgacctgcaggtgaatgttattcaagatgaatgttattcatcgtgaatgttattcagactgaatgttattcactatgaatgttattcaacttgaatgttattcatgctgaatgttattcagtatgaatgttattcaggcgcgccatgcttcatcagactct

SEQ ID NO: 9151 - DNA, 196 bp, Artificial Sequence; identical to SEQ ID NO: 9150
  Synthetic polynucleotide

SEQ ID NO: 9152 - DNA, 140 bp, Artificial Sequence
  Synthetic polynucleotide
atcatctcaccttgcctcctgtctgggtagatatttcccctgcaggttggcaagattggcatcgttggcagacttggcactattggcaactttggcatgcttggcagtattggcaggcgcgccatgcttcatcagactct

SEQ ID NO: 9153 - DNA, 140 bp, Artificial Sequence; identical to SEQ ID NO: 9152
  Synthetic polynucleotide

SEQ ID NO: 9154 - DNA, 164 bp, Artificial Sequence
  Synthetic polynucleotide
atcatctcaccttgcctcctgggatgctcgtgacgagacctgcaggttaattgctagattaattgcttcgttaattgctgacttaattgctctattaattgctactttaattgcttgcttaattgctgtattaattgctggcgcgccatgcttcatcagactct

SEQ ID NO: 9155 - DNA, 164 bp, Artificial Sequence; identical to SEQ ID NO: 9154
  Synthetic polynucleotide

SEQ ID NO: 9156 - DNA, 188 bp, Artificial Sequence
  Synthetic polynucleotide
atcatctcaccttgcctcctgaattctccgctaccggacctgcaggagctcaaggtcaagaagctcaaggtcatcgagctcaaggtcagacagctcaaggtcactaagctcaaggtcaactagctcaaggtcatgcagctcaaggtcagtaagctcaaggtcaggcgcgccatgcttcatcagactct

SEQ ID NO: 9157 - DNA, 188 bp, Artificial Sequence; identical to SEQ ID NO: 9156
  Synthetic polynucleotide

SEQ ID NO: 9158 - DNA, 156 bp, Artificial Sequence
  Synthetic polynucleotide
atcatctcaccttgcctcctgagcaatattagcccggacctgcaggtcttatctagatcttatcttcgtcttatctgactcttatctctatcttatctacttcttatcttgctcttatctgtatcttatctggcgcgccatgcttcatcagactct

SEQ ID NO: 9159 - DNA, 156 bp, Artificial Sequence; identical to SEQ ID NO: 9158
  Synthetic polynucleotide

SEQ ID NO: 9160 - DNA, 185 bp, Artificial Sequence
  Synthetic polynucleotide
atcatctcaccttgcctcctgggttaattacagatagccctgcagggccatccaaaatgaacagagccatccaaaatgaactcggccatccaaaatgaacgacgccatccaaaatgaacctagccatccaaaatgaacactgccatccaaaatgaactgcggcgcgccatgcttcatcagactct

SEQ ID NO: 9161 - DNA, 185 bp, Artificial Sequence; identical to SEQ ID NO: 9160
  Synthetic polynucleotide

SEQ ID NO: 9162 - DNA, 196 bp, Artificial Sequence
  Synthetic polynucleotide
atcatctcaccttgcctcctgaggaggtctcaacggtccctgcagggcagagggcagcgagagcagagggcagcgtcggcagagggcagcggacgcagagggcagcgctagcagagggcagcgactgcagagggcagcgtgcgcagagggcagcggtagcagagggcagcgggcgcgccatgcttcatcagactct

SEQ ID NO: 9163 - DNA, 196 bp, Artificial Sequence; identical to SEQ ID NO: 9162
  Synthetic polynucleotide

SEQ ID NO: 9164 - DNA, 180 bp, Artificial Sequence
  Synthetic polynucleotide
atcatctcaccttgcctcctggagtcagcgttcttagccctgcaggaaccggaaataagaaaccggaaatatcgaaccggaaatagacaaccggaaatactaaaccggaaataactaaccggaaatatgcaaccggaaatagtaaaccggaaataggcgcgccatgcttcatcagactct

SEQ ID NO: 9165 - DNA, 180 bp, Artificial Sequence; identical to SEQ ID NO: 9164
  Synthetic polynucleotide

SEQ ID NO: 9166 - DNA, 190 bp, Artificial Sequence
  Synthetic polynucleotide
atcatctcaccttgcctcctgtacactgccagggattccctgcaggtgccgcacgtacgcagatgccgcacgtacgctcgtgccgcacgtacgcgactgccgcacgtacgcctatgccgcacgtacgcacttgccgcacgtacgctgctgccgcacgtacgcgtaggcgcgccatgcttcatcagactct

SEQ ID NO: 9167 - DNA, 190 bp, Artificial Sequence; identical to SEQ ID NO: 9166
  Synthetic polynucleotide

SEQ ID NO: 9168 - DNA, 172 bp, Artificial Sequence
  Synthetic polynucleotide
atcatctcaccttgcctcctgatctgtctgtatagggtcctgcagggttaattgctagagttaattgcttcggttaattgctgacgttaattgctctagttaattgctactgttaattgcttgcgttaattgctgtagttaattgctggcgcgccatgcttcatcagactct

SEQ ID NO: 9169 - DNA, 172 bp, Artificial Sequence; identical to SEQ ID NO: 9168
  Synthetic polynucleotide

SEQ ID NO: 9170 - DNA, 191 bp, Artificial Sequence
  Synthetic polynucleotide
atcatctcaccttgcctcctgagtgcagaagcggcaagcctgcaggaccggttgatcacctgaagaaccggttgatcacctgatcgaccggttgatcacctgagacaccggttgatcacctgactaaccggttgatcacctgaactaccggttgatcacctgatgcggcgcgccatgcttcatcagactct

SEQ ID NO: 9171 - DNA, 191 bp, Artificial Sequence; identical to SEQ ID NO: 9170
  Synthetic polynucleotide

SEQ ID NO: 9172 - DNA, 179 bp, Artificial Sequence
  Synthetic polynucleotide
atcatctcaccttgcctcctgaccaacgccgatattcccctgcaggctgaaagatgacgtgtcatttaatagactgaaagatgacgtgtcatttaattcgctgaaagatgacgtgtcatttaatgacctgaaagatgacgtgtcatttaatctaggcgcgccatgcttcatcagactct

SEQ ID NO: 9173 - DNA, 179 bp, Artificial Sequence; identical to SEQ ID NO: 9172
  Synthetic polynucleotide

SEQ ID NO: 9174 - DNA, 164 bp, Artificial Sequence
  Synthetic polynucleotide
atcatctcaccttgcctcctggacacccttgcagagttcctgcaggggcacgtgtagaggcacgtgttcgggcacgtgtgacggcacgtgtctaggcacgtgtactggcacgtgttgcggcacgtgtgtaggcacgtgtggcgcgccatgcttcatcagactct

SEQ ID NO: 9175 - DNA, 164 bp, Artificial Sequence; identical to SEQ ID NO: 9174
  Synthetic polynucleotide

SEQ ID NO: 9176 - DNA, 188 bp, Artificial Sequence
  Synthetic polynucleotide
atcatctcaccttgcctcctgtaatcgtgatccaggtccctgcaggtgtttgtttattagatgtttgtttatttcgtgtttgtttattgactgtttgtttattctatgtttgtttattacttgtttgtttatttgctgtttgtttattgtatgtttgtttattggcgcgccatgcttcatcagactct

SEQ ID NO: 9177 - DNA, 188 bp, Artificial Sequence; identical to SEQ ID NO: 9176
  Synthetic polynucleotide

SEQ ID NO: 9178 - DNA, 200 bp, Artificial Sequence
  Synthetic polynucleotide
atcatctcaccttgcctcctgggattgcggacatgtaacctgcaggtcacctgttgctaggcagaagatcacctgttgctaggcagatcgtcacctgttgctaggcagagactcacctgttgctaggcagactatcacctgttgctaggcagaacttcacctgttgctaggcagaggcgcgccatgcttcatcagactct

SEQ ID NO: 9179 - DNA, 200 bp, Artificial Sequence; identical to SEQ ID NO: 9178
  Synthetic polynucleotide

SEQ ID NO: 9180 - DNA, 156 bp, Artificial Sequence
  Synthetic polynucleotide
atcatctcaccttgcctcctgcgtcggattaattccgtcctgcaggcctgtcaaagacctgtcaatcgcctgtcaagaccctgtcaactacctgtcaaactcctgtcaatgccctgtcaagtacctgtcaaggcgcgccatgcttcatcagactct

SEQ ID NO: 9181 - DNA, 156 bp, Artificial Sequence; identical to SEQ ID NO: 9180
  Synthetic polynucleotide

SEQ ID NO: 9182 - DNA, 156 bp, Artificial Sequence
  Synthetic polynucleotide
atcatctcaccttgcctcctgtcaacgccctagagtaacctgcaggtcttatcaagatcttatcatcgtcttatcagactcttatcactatcttatcaacttcttatcatgctcttatcagtatcttatcaggcgcgccatgcttcatcagactct

SEQ ID NO: 9183 - DNA, 156 bp, Artificial Sequence; identical to SEQ ID NO: 9182
  Synthetic polynucleotide

SEQ ID NO: 9184 - DNA, 164 bp, Artificial Sequence
  Synthetic polynucleotide
atcatctcaccttgcctcctgcccactatcggaacgtccctgcaggttaattgccagattaattgcctcgttaattgccgacttaattgccctattaattgccactttaattgcctgcttaattgccgtattaattgccggcgcgccatgcttcatcagactct

SEQ ID NO: 9185 - DNA, 164 bp, Artificial Sequence; identical to SEQ ID NO: 9184
  Synthetic polynucleotide

SEQ ID NO: 9186 - DNA, 180 bp, Artificial Sequence
  Synthetic polynucleotide
atcatctcaccttgcctcctgtagttggatgtcggctccctgcagggataagcatctagagataagcatcttcggataagcatctgacgataagcatctctagataagcatctactgataagcatcttgcgataagcatctgtagataagcatctggcgcgccatgcttcatcagactct

SEQ ID NO: 9187 - DNA, 180 bp, Artificial Sequence; identical to SEQ ID NO: 9186
  Synthetic polynucleotide

SEQ ID NO: 9188 - DNA, 197 bp, Artificial Sequence
  Synthetic polynucleotide
atcatctcaccttgcctcctgccgattagcgttaaccgcctgcaggccagggtatcagccgagaccagggtatcagccgtcgccagggtatcagccggacccagggtatcagccgctaccagggtatcagccgactccagggtatcagccgtgcccagggtatcagccggtaggcgcgccatgcttcatcagactct

SEQ ID NO: 9189 - DNA, 197 bp, Artificial Sequence; identical to SEQ ID NO: 9188
  Synthetic polynucleotide

SEQ ID NO: 9190 - DNA, 196 bp, Artificial Sequence
  Synthetic polynucleotide
atcatctcaccttgcctcctgaggtgaacgagtttgtccctgcagggctactgtgtttcagagctactgtgtttctcggctactgtgtttcgacgctactgtgtttcctagctactgtgtttcactgctactgtgtttctgcgctactgtgtttcgtagctactgtgtttcggcgcgccatgcttcatcagactct

SEQ ID NO: 9191 - DNA, 196 bp, Artificial Sequence; identical to SEQ ID NO: 9190
  Synthetic polynucleotide

SEQ ID NO: 9192 - DNA, 180 bp, Artificial Sequence
  Synthetic polynucleotide
atcatctcaccttgcctcctgagacgtacatcttctcgcctgcaggggaggccggggagaggaggccggggtcgggaggccgggggacggaggccggggctaggaggccggggactggaggccggggtgcggaggccgggggtaggaggccggggggcgcgccatgcttcatcagactct

SEQ ID NO: 9193 - DNA, 180 bp, Artificial Sequence; identical to SEQ ID NO: 9192
  Synthetic polynucleotide

SEQ ID NO: 9194 - DNA, 191 bp, Artificial Sequence
  Synthetic polynucleotide
atcatctcaccttgcctcctgcgcaaatacgagttcgacctgcaggcttaaccacttaaggatagacttaaccacttaaggattcgcttaaccacttaaggatgaccttaaccacttaaggatctacttaaccacttaaggatactcttaaccacttaaggattgcggcgcgccatgcttcatcagactct

SEQ ID NO: 9195 - DNA, 191 bp, Artificial Sequence; identical to SEQ ID NO: 9194
  Synthetic polynucleotide

SEQ ID NO: 9196 - DNA, 188 bp, Artificial Sequence
  Synthetic polynucleotide
atcatctcaccttgcctcctgtcgctatggtcgtcgaacctgcaggaaagcaattaagagaaaagcaattaagtcgaaagcaattaaggacaaagcaattaagctaaaagcaattaagactaaagcaattaagtgcaaagcaattaaggtaaaagcaattaagggcgcgccatgcttcatcagactct

SEQ ID NO: 9197 - DNA, 188 bp, Artificial Sequence; identical to SEQ ID NO: 9196
  Synthetic polynucleotide

SEQ ID NO: 9198 - DNA, 185 bp, Artificial Sequence
  Synthetic polynucleotide
atcatctcaccttgcctcctgcgactcaaacctgaatacctgcaggtaagccacttgaatttagataagccacttgaattttcgtaagccacttgaatttgactaagccacttgaatttctataagccacttgaatttacttaagccacttgaattttgcggcgcgccatgcttcatcagactct

SEQ ID NO: 9199 - DNA, 185 bp, Artificial Sequence; identical to SEQ ID NO: 9198
  Synthetic polynucleotide

SEQ ID NO: 9200 - DNA, 180 bp, Artificial Sequence
  Synthetic polynucleotide
atcatctcaccttgcctcctggttcgtagatagttgtgcctgcagggccacaccctgagagccacaccctgtcggccacaccctggacgccacaccctgctagccacaccctgactgccacaccctgtgcgccacaccctggtagccacaccctgggcgcgccatgcttcatcagactct

SEQ ID NO: 9201 - DNA, 180 bp, Artificial Sequence; identical to SEQ ID NO: 9200
  Synthetic polynucleotide

SEQ ID NO: 9202 - DNA, 180 bp, Artificial Sequence
  Synthetic polynucleotide
atcatctcaccttgcctcctggtggcaaatgcaggacgcctgcaggtcccattggctagatcccattggcttcgtcccattggctgactcccattggctctatcccattggctacttcccattggcttgctcccattggctgtatcccattggctggcgcgccatgcttcatcagactct

SEQ ID NO: 9203 - DNA, 180 bp, Artificial Sequence; identical to SEQ ID NO: 9202
  Synthetic polynucleotide

SEQ ID NO: 9204 - DNA, 180 bp, Artificial Sequence
  Synthetic polynucleotide
atcatctcaccttgcctcctgtcttggattggcgaacccctgcaggaatgagtcacaagaaatgagtcacatcgaatgagtcacagacaatgagtcacactaaatgagtcacaactaatgagtcacatgcaatgagtcacagtaaatgagtcacaggcgcgccatgcttcatcagactct

SEQ ID NO: 9205 - DNA, 180 bp, Artificial Sequence; identical to SEQ ID NO: 9204
  Synthetic polynucleotide

SEQ ID NO: 9206 - DNA, 164 bp, Artificial Sequence
  Synthetic polynucleotide
atcatctcaccttgcctcctgagcaatctctgcatagacctgcaggggggtggtcagaggggtggtctcgggggtggtcgacggggtggtcctaggggtggtcactggggtggtctgcggggtggtcgtaggggtggtcggcgcgccatgcttcatcagactct

SEQ ID NO: 9207 - DNA, 164 bp, Artificial Sequence; identical to SEQ ID NO: 9206
  Synthetic polynucleotide

SEQ ID NO: 9208 - DNA, 172 bp, Artificial Sequence
  Synthetic polynucleotide
atcatctcaccttgcctcctgcacgcataaagacttggcctgcaggaggcatgtctagaaggcatgtcttcgaggcatgtctgacaggcatgtctctaaggcatgtctactaggcatgtcttgcaggcatgtctgtaaggcatgtctggcgcgccatgcttcatcagactct

SEQ ID NO: 9209 - DNA, 172 bp, Artificial Sequence; identical to SEQ ID NO: 9208
  Synthetic polynucleotide

SEQ ID NO: 9210 - DNA, 156 bp, Artificial Sequence
  Synthetic polynucleotide
atcatctcaccttgcctcctggagcggcgaatctgtctcctgcaggtttgatatagatttgatattcgtttgatatgactttgatatctatttgatatacttttgatattgctttgatatgtatttgatatggcgcgccatgcttcatcagactct

SEQ ID NO: 9211 - DNA, 156 bp, Artificial Sequence; identical to SEQ ID NO: 9210
  Synthetic polynucleotide

SEQ ID NO: 9212 - DNA, 188 bp, Artificial Sequence
  Synthetic polynucleotide
atcatctcaccttgcctcctgctggcttgggagagaatcctgcaggggtgacgtcattagaggtgacgtcatttcgggtgacgtcattgacggtgacgtcattctaggtgacgtcattactggtgacgtcatttgcggtgacgtcattgtaggtgacgtcattggcgcgccatgcttcatcagactct

SEQ ID NO: 9213 - DNA, 188 bp, Artificial Sequence; identical to SEQ ID NO: 9212
  Synthetic polynucleotide

SEQ ID NO: 9214 - DNA, 172 bp, Artificial Sequence
  Synthetic polynucleotide
atcatctcaccttgcctcctgtacagaagcgtcactcccctgcaggaggtaggtacagaaggtaggtactcgaggtaggtacgacaggtaggtacctaaggtaggtacactaggtaggtactgcaggtaggtacgtaaggtaggtacggcgcgccatgcttcatcagactct

SEQ ID NO: 9215 - DNA, 172 bp, Artificial Sequence; identical to SEQ ID NO: 9214
  Synthetic polynucleotide

SEQ ID NO: 9216 - DNA, 188 bp, Artificial Sequence
  Synthetic polynucleotide
atcatctcaccttgcctcctggcatacgaagaagctgacctgcaggttaaaaatagccagattaaaaatagcctcgttaaaaatagccgacttaaaaatagccctattaaaaatagccactttaaaaatagcctgcttaaaaatagccgtattaaaaatagccggcgcgccatgcttcatcagactct

SEQ ID NO: 9217 - DNA, 188 bp, Artificial Sequence; identical to SEQ ID NO: 9216
  Synthetic polynucleotide

SEQ ID NO: 9218 - DNA, 172 bp, Artificial Sequence
  Synthetic polynucleotide
atcatctcaccttgcctcctgaaggcctagtttagtgccctgcaggcagataagaaagacagataagaatcgcagataagaagaccagataagaactacagataagaaactcagataagaatgccagataagaagtacagataagaaggcgcgccatgcttcatcagactct

SEQ ID NO: 9219 - DNA, 172 bp, Artificial Sequence; identical to SEQ ID NO: 9218
  Synthetic polynucleotide

SEQ ID NO: 9220 - DNA, 172 bp, Artificial Sequence
  Synthetic polynucleotide
atcatctcaccttgcctcctgaaggtaaagcgctaagtcctgcagggccacgcgcgagagccacgcgcgtcggccacgcgcggacgccacgcgcgctagccacgcgcgactgccacgcgcgtgcgccacgcgcggtagccacgcgcgggcgcgccatgcttcatcagactct

SEQ ID NO: 9221 - DNA, 172 bp, Artificial Sequence; identical to SEQ ID NO: 9220
  Synthetic polynucleotide

SEQ ID NO: 9222 - DNA, 196 bp, Artificial Sequence
  Synthetic polynucleotide
atcatctcaccttgcctcctgacgggtgtgacatatgtcctgcagggatgactcacacaagagatgactcacacatcggatgactcacacagacgatgactcacacactagatgactcacacaactgatgactcacacatgcgatgactcacacagtagatgactcacacaggcgcgccatgcttcatcagactct

SEQ ID NO: 9223 - DNA, 196 bp, Artificial Sequence; identical to SEQ ID NO: 9222
  Synthetic polynucleotide

SEQ ID NO: 9224 - DNA, 197 bp, Artificial Sequence
  Synthetic polynucleotide
atcatctcaccttgcctcctggcgtcgattatcgaggacctgcaggccgttccgctctagatatagaccgttccgctctagatattcgccgttccgctctagatatgacccgttccgctctagatatctaccgttccgctctagatatactccgttccgctctagatattgcggcgcgccatgcttcatcagactct

SEQ ID NO: 9225 - DNA, 197 bp, Artificial Sequence; identical to SEQ ID NO: 9224
  Synthetic polynucleotide

SEQ ID NO: 9226 - DNA, 191 bp, Artificial Sequence
  Synthetic polynucleotide
atcatctcaccttgcctcctggctgctcattctgtgagcctgcaggttgtttaccgtaaacatagattgtttaccgtaaacattcgttgtttaccgtaaacatgacttgtttaccgtaaacatctattgtttaccgtaaacatactttgtttaccgtaaacattgcggcgcgccatgcttcatcagactct

SEQ ID NO: 9227 - DNA, 191 bp, Artificial Sequence; identical to SEQ ID NO: 9226
  Synthetic polynucleotide

SEQ ID NO: 9228 - DNA, 191 bp, Artificial Sequence
  Synthetic polynucleotide
atcatctcaccttgcctcctgcctctattccatctggtcctgcaggtattatgggatggataaagatattatgggatggataatcgtattatgggatggataagactattatgggatggataactatattatgggatggataaacttattatgggatggataatgcggcgcgccatgcttcatcagactct

SEQ ID NO: 9229 - DNA, 191 bp, Artificial Sequence; identical to SEQ ID NO: 9228
  Synthetic polynucleotide

SEQ ID NO: 9230 - DNA, 180 bp, Artificial Sequence
  Synthetic polynucleotide
atcatctcaccttgcctcctgagcttaagttgaagcaccctgcaggttgcgtcatcaagattgcgtcatcatcgttgcgtcatcagacttgcgtcatcactattgcgtcatcaactttgcgtcatcatgcttgcgtcatcagtattgcgtcatcaggcgcgccatgcttcatcagactct

SEQ ID NO: 9231 - DNA, 180 bp, Artificial Sequence; identical to SEQ ID NO: 9230
  Synthetic polynucleotide

SEQ ID NO: 9232 - DNA, 164 bp, Artificial Sequence
  Synthetic polynucleotide
atcatctcaccttgcctcctggagcttatagccgctgccctgcaggagccaaaccagaagccaaacctcgagccaaaccgacagccaaaccctaagccaaaccactagccaaacctgcagccaaaccgtaagccaaaccggcgcgccatgcttcatcagactct

SEQ ID NO: 9233 - DNA, 164 bp, Artificial Sequence; identical to SEQ ID NO: 9232
  Synthetic polynucleotide

SEQ ID NO: 9234 - DNA, 156 bp, Artificial Sequence
  Synthetic polynucleotide
atcatctcaccttgcctcctgtctttggttgttacgcacctgcaggattcaaatagaattcaaattcgattcaaatgacattcaaatctaattcaaatactattcaaattgcattcaaatgtaattcaaatggcgcgccatgcttcatcagactct

SEQ ID NO: 9235 - DNA, 156 bp, Artificial Sequence; identical to SEQ ID NO: 9234
  Synthetic polynucleotide

SEQ ID NO: 9236 - DNA, 156 bp, Artificial Sequence
  Synthetic polynucleotide
atcatctcaccttgcctcctgcgatatcggctcagagtcctgcagggcacttaaagagcacttaatcggcacttaagacgcacttaactagcacttaaactgcacttaatgcgcacttaagtagcacttaaggcgcgccatgcttcatcagactct

SEQ ID NO: 9237 - DNA, 156 bp, Artificial Sequence; identical to SEQ ID NO: 9236
  Synthetic polynucleotide

SEQ ID NO: 9238 - DNA, 191 bp, Artificial Sequence
  Synthetic polynucleotide
atcatctcaccttgcctcctgtcggttgtaaactcgtgcctgcaggccaccagggggcgccagagaccaccagggggcgccagtcgccaccagggggcgccaggacccaccagggggcgccagctaccaccagggggcgccagactccaccagggggcgccagtgcggcgcgccatgcttcatcagactct

SEQ ID NO: 9239 - DNA, 191 bp, Artificial Sequence; identical to SEQ ID NO: 9238
  Synthetic polynucleotide

SEQ ID NO: 9240 - DNA, 197 bp, Artificial Sequence
  Synthetic polynucleotide
atcatctcaccttgcctcctgaaggtgaaacgctctcgcctgcaggttgttgccatggctactaagattgttgccatggctactatcgttgttgccatggctactagacttgttgccatggctactactattgttgccatggctactaactttgttgccatggctactatgcggcgcgccatgcttcatcagactct

SEQ ID NO: 9241 - DNA, 197 bp, Artificial Sequence; identical to SEQ ID NO: 9240
  Synthetic polynucleotide

SEQ ID NO: 9242 - DNA, 190 bp, Artificial Sequence
  Synthetic polynucleotide
atcatctcaccttgcctcctgcgctctatttagtggttcctgcaggaagtgggcgtggccagaaagtgggcgtggcctcgaagtgggcgtggccgacaagtgggcgtggccctaaagtgggcgtggccactaagtgggcgtggcctgcaagtgggcgtggccgtaggcgcgccatgcttcatcagactct

SEQ ID NO: 9243 - DNA, 190 bp, Artificial Sequence; identical to SEQ ID NO: 9242
  Synthetic polynucleotide

SEQ ID NO: 9244 - DNA, 140 bp, Artificial Sequence
  Synthetic polynucleotide
atcatctcaccttgcctcctgacgacccggtatacctccctgcaggggattaagaggattatcgggattagacggattactaggattaactggattatgcggattagtaggattaggcgcgccatgcttcatcagactct

SEQ ID NO: 9245 - DNA, 140 bp, Artificial Sequence; identical to SEQ ID NO: 9244
  Synthetic polynucleotide

SEQ ID NO: 9246 - DNA, 197 bp, Artificial Sequence
  Synthetic polynucleotide
atcatctcaccttgcctcctgttgaatctgcaccctcacctgcaggagttttggcgccaaaattagaagttttggcgccaaaatttcgagttttggcgccaaaattgacagttttggcgccaaaattctaagttttggcgccaaaattactagttttggcgccaaaatttgcggcgcgccatgcttcatcagactct

SEQ ID NO: 9247 - DNA, 197 bp, Artificial Sequence; identical to SEQ ID NO: 9246
  Synthetic polynucleotide

SEQ ID NO: 9248 - DNA, 197 bp, Artificial Sequence
  Synthetic polynucleotide
atcatctcaccttgcctcctgagcatagcctagttcaacctgcaggacatgtccatggacatgtagaacatgtccatggacatgttcgacatgtccatggacatgtgacacatgtccatggacatgtctaacatgtccatggacatgtactacatgtccatggacatgttgcggcgcgccatgcttcatcagactct

SEQ ID NO: 9249 - DNA, 197 bp, Artificial Sequence; identical to SEQ ID NO: 9248
  Synthetic polynucleotide

SEQ ID NO: 9250 - DNA, 196 bp, Artificial Sequence
  Synthetic polynucleotide
atcatctcaccttgcctcctgctaagaaacgtaaggcgcctgcagggggggggggggtggtttggggtagagggggggggggtggtttggggttcggggggggggggtggtttggggtgacgggggggggggtggtttggggtctagggggggggggtggtttggggtactggcgcgccatgcttcatcagactct

SEQ ID NO: 9251 - DNA, 196 bp, Artificial Sequence; identical to SEQ ID NO: 9250
  Synthetic polynucleotide

SEQ ID NO: 9252 - DNA, 164 bp, Artificial Sequence
  Synthetic polynucleotide
atcatctcaccttgcctcctgagttacggtggcgctaacctgcaggaattttccaagaaattttccatcgaattttccagacaattttccactaaattttccaactaattttccatgcaattttccagtaaattttccaggcgcgccatgcttcatcagactct

SEQ ID NO: 9253 - DNA, 164 bp, Artificial Sequence; identical to SEQ ID NO: 9252
  Synthetic polynucleotide

SEQ ID NO: 9254 - DNA, 156 bp, Artificial Sequence
  Synthetic polynucleotide
atcatctcaccttgcctcctgactcgaggttctgtattcctgcaggtttgacagagatttgacagtcgtttgacaggactttgacagctatttgacagacttttgacagtgctttgacaggtatttgacagggcgcgccatgcttcatcagactct

SEQ ID NO: 9255 - DNA, 156 bp, Artificial Sequence; identical to SEQ ID NO: 9254
  Synthetic polynucleotide

SEQ ID NO: 9256 - DNA, 196 bp, Artificial Sequence
  Synthetic polynucleotide
atcatctcaccttgcctcctggtgacgtacgtagtttgcctgcagggcaaccaaccttgagagcaaccaaccttgtcggcaaccaaccttggacgcaaccaaccttgctagcaaccaaccttgactgcaaccaaccttgtgcgcaaccaaccttggtagcaaccaaccttgggcgcgccatgcttcatcagactct

SEQ ID NO: 9257 - DNA, 196 bp, Artificial Sequence; identical to SEQ ID NO: 9256
  Synthetic polynucleotide

SEQ ID NO: 9258 - DNA, 172 bp, Artificial Sequence
  Synthetic polynucleotide
atcatctcaccttgcctcctgagtgagagctgccgactcctgcaggtttaattaccagatttaattacctcgtttaattaccgactttaattaccctatttaattaccacttttaattacctgctttaattaccgtatttaattaccggcgcgccatgcttcatcagactct

SEQ ID NO: 9259 - DNA, 172 bp, Artificial Sequence; identical to SEQ ID NO: 9258
  Synthetic polynucleotide

SEQ ID NO: 9260 - DNA, 197 bp, Artificial Sequence
  Synthetic polynucleotide
atcatctcaccttgcctcctgtccgtaagaccggtacacctgcaggatttgcataacaaagagaatttgcataacaaagtcgatttgcataacaaaggacatttgcataacaaagctaatttgcataacaaagactatttgcataacaaagtgcatttgcataacaaaggtaggcgcgccatgcttcatcagactct

SEQ ID NO: 9261 - DNA, 197 bp, Artificial Sequence; identical to SEQ ID NO: 9260
  Synthetic polynucleotide

SEQ ID NO: 9262 - DNA, 191 bp, Artificial Sequence
  Synthetic polynucleotide
atcatctcaccttgcctcctggtccaaagtgcaggcagcctgcaggtagagggattaaatttcagatagagggattaaatttctcgtagagggattaaatttcgactagagggattaaatttcctatagagggattaaatttcacttagagggattaaatttctgcggcgcgccatgcttcatcagactct

SEQ ID NO: 9263 - DNA, 191 bp, Artificial Sequence; identical to SEQ ID NO: 9262
  Synthetic polynucleotide

SEQ ID NO: 9264 - DNA, 196 bp, Artificial Sequence
  Synthetic polynucleotide
atcatctcaccttgcctcctggctacccggatcgcaatcctgcaggttggaaatcccctagattggaaatccccttcgttggaaatcccctgacttggaaatcccctctattggaaatcccctactttggaaatccccttgcttggaaatcccctgtattggaaatcccctggcgcgccatgcttcatcagactct

SEQ ID NO: 9265 - DNA, 196 bp, Artificial Sequence; identical to SEQ ID NO: 9264
  Synthetic polynucleotide

SEQ ID NO: 9266 - DNA, 172 bp, Artificial Sequence
  Synthetic polynucleotide
atcatctcaccttgcctcctggccaactgatattactccctgcaggcggtcacgctagacggtcacgcttcgcggtcacgctgaccggtcacgctctacggtcacgctactcggtcacgcttgccggtcacgctgtacggtcacgctggcgcgccatgcttcatcagactct

SEQ ID NO: 9267 - DNA, 172 bp, Artificial Sequence; identical to SEQ ID NO: 9266
  Synthetic polynucleotide

SEQ ID NO: 9268 - DNA, 197 bp, Artificial Sequence
  Synthetic polynucleotide
atcatctcaccttgcctcctgagacaacactattgggtcctgcaggatatctagagcggaacggagaatatctagagcggaacggtcgatatctagagcggaacgggacatatctagagcggaacggctaatatctagagcggaacggactatatctagagcggaacggtgcggcgcgccatgcttcatcagactct

SEQ ID NO: 9269 - DNA, 197 bp, Artificial Sequence; identical to SEQ ID NO: 9268
  Synthetic polynucleotide

SEQ ID NO: 9270 - DNA, 185 bp, Artificial Sequence
  Synthetic polynucleotide
atcatctcaccttgcctcctgacgctgtcatttgctcgcctgcaggattgaacaatggaattagaattgaacaatggaatttcgattgaacaatggaattgacattgaacaatggaattctaattgaacaatggaattactattgaacaatggaatttgcggcgcgccatgcttcatcagactct

SEQ ID NO: 9271 - DNA, 185 bp, Artificial Sequence; identical to SEQ ID NO: 9270
  Synthetic polynucleotide

SEQ ID NO: 9272 - DNA, 183 bp, Artificial Sequence
  Synthetic polynucleotide
atcatctcaccttgcctcctgtgttggagatatgagaacctgcaggaacagatggtcgcccaaccactggaagaaacagatggtcgcccaaccactggatcgaacagatggtcgcccaaccactggagacaacagatggtcgcccaaccactggactaggcgcgccatgcttcatcagactct

SEQ ID NO: 9273 - DNA, 183 bp, Artificial Sequence; identical to SEQ ID NO: 9272
  Synthetic polynucleotide

SEQ ID NO: 9274 - DNA, 164 bp, Artificial Sequence
  Synthetic polynucleotide
atcatctcaccttgcctcctgctggatatcagattagccctgcagggtgactcagagagtgactcagtcggtgactcaggacgtgactcagctagtgactcagactgtgactcagtgcgtgactcaggtagtgactcagggcgcgccatgcttcatcagactct

SEQ ID NO: 9275 - DNA, 164 bp, Artificial Sequence; identical to SEQ ID NO: 9274
  Synthetic polynucleotide

SEQ ID NO: 9276 - DNA, 164 bp, Artificial Sequence
  Synthetic polynucleotide
atcatctcaccttgcctcctggatatcgattggagtcgcctgcaggcgataatgaagacgataatgatcgcgataatgagaccgataatgactacgataatgaactcgataatgatgccgataatgagtacgataatgaggcgcgccatgcttcatcagactct

SEQ ID NO: 9277 - DNA, 164 bp, Artificial Sequence; identical to SEQ ID NO: 9276
  Synthetic polynucleotide

SEQ ID NO: 9278 - DNA, 172 bp, Artificial Sequence
  Synthetic polynucleotide
atcatctcaccttgcctcctgtgcgagaatgtacaatacctgcaggtttaatcccaagatttaatcccatcgtttaatcccagactttaatcccactatttaatcccaacttttaatcccatgctttaatcccagtatttaatcccaggcgcgccatgcttcatcagactct

SEQ ID NO: 9279 - DNA, 172 bp, Artificial Sequence; identical to SEQ ID NO: 9278
  Synthetic polynucleotide

SEQ ID NO: 9280 - DNA, 172 bp, Artificial Sequence
  Synthetic polynucleotide
atcatctcaccttgcctcctgcctagtaaggagcttgccctgcaggcagcaccaggagacagcaccaggtcgcagcaccagggaccagcaccaggctacagcaccaggactcagcaccaggtgccagcaccagggtacagcaccaggggcgcgccatgcttcatcagactct

SEQ ID NO: 9281 - DNA, 172 bp, Artificial Sequence; identical to SEQ ID NO: 9280
  Synthetic polynucleotide

SEQ ID NO: 9282 - DNA, 190 bp, Artificial Sequence
  Synthetic polynucleotide
atcatctcaccttgcctcctggtgttggaggtcgcagtcctgcaggaaaaccaaaaaaatagaaaaaccaaaaaaattcgaaaaccaaaaaaatgacaaaaccaaaaaaatctaaaaaccaaaaaaatactaaaaccaaaaaaattgcaaaaccaaaaaaatgtaggcgcgccatgcttcatcagactct

SEQ ID NO: 9283 - DNA, 190 bp, Artificial Sequence; identical to SEQ ID NO: 9282
  Synthetic polynucleotide

SEQ ID NO: 9284 - DNA, 191 bp, Artificial Sequence
  Synthetic polynucleotide
atcatctcaccttgcctcctgttgtatcaaatcaggcgcctgcaggcaattaaataccgattaagacaattaaataccgattatcgcaattaaataccgattagaccaattaaataccgattactacaattaaataccgattaactcaattaaataccgattatgcggcgcgccatgcttcatcagactct

SEQ ID NO: 9285 - DNA, 191 bp, Artificial Sequence; identical to SEQ ID NO: 9284
  Synthetic polynucleotide

SEQ ID NO: 9286 - DNA, 191 bp, Artificial Sequence
  Synthetic polynucleotide
atcatctcaccttgcctcctgcgcctatgtccacaattcctgcaggcaccgttgattgggtcgagacaccgttgattgggtcgtcgcaccgttgattgggtcggaccaccgttgattgggtcgctacaccgttgattgggtcgactcaccgttgattgggtcgtgcggcgcgccatgcttcatcagactct

SEQ ID NO: 9287 - DNA, 191 bp, Artificial Sequence; identical to SEQ ID NO: 9286
  Synthetic polynucleotide

SEQ ID NO: 9288 - DNA, 190 bp, Artificial Sequence
  Synthetic polynucleotide
atcatctcaccttgcctcctggccgctgttatcccgatcctgcaggggttaatgattaacagaggttaatgattaactcgggttaatgattaacgacggttaatgattaacctaggttaatgattaacactggttaatgattaactgcggttaatgattaacgtaggcgcgccatgcttcatcagactct

SEQ ID NO: 9289 - DNA, 190 bp, Artificial Sequence; identical to SEQ ID NO: 9288
  Synthetic polynucleotide

SEQ ID NO: 9290 - DNA, 191 bp, Artificial Sequence
  Synthetic polynucleotide
atcatctcaccttgcctcctggcgccttgaagcactctcctgcaggatgctaaaaatagattgagaatgctaaaaatagattgtcgatgctaaaaatagattggacatgctaaaaatagattgctaatgctaaaaatagattgactatgctaaaaatagattgtgcggcgcgccatgcttcatcagactct

SEQ ID NO: 9291 - DNA, 191 bp, Artificial Sequence; identical to SEQ ID NO: 9290
  Synthetic polynucleotide

SEQ ID NO: 9292 - DNA, 185 bp, Artificial Sequence
  Synthetic polynucleotide
atcatctcaccttgcctcctgcggacagtcagggttaccctgcaggttaagaacaataatttagattaagaacaataattttcgttaagaacaataatttgacttaagaacaataatttctattaagaacaataatttactttaagaacaataattttgcggcgcgccatgcttcatcagactct

SEQ ID NO: 9293 - DNA, 185 bp, Artificial Sequence; identical to SEQ ID NO: 9292
  Synthetic polynucleotide

SEQ ID NO: 9294 - DNA, 164 bp, Artificial Sequence
  Synthetic polynucleotide
atcatctcaccttgcctcctgcgacctgtaggcagtgtcctgcaggccatatgttagaccatatgtttcgccatatgttgacccatatgttctaccatatgttactccatatgtttgcccatatgttgtaccatatgttggcgcgccatgcttcatcagactct

SEQ ID NO: 9295 - DNA, 164 bp, Artificial Sequence; identical to SEQ ID NO: 9294
  Synthetic polynucleotide

SEQ ID NO: 9296 - DNA, 188 bp, Artificial Sequence
  Synthetic polynucleotide
atcatctcaccttgcctcctgaaggcttctcgaagtttcctgcaggaaaatgaaactgagaaaaatgaaactgtcgaaaatgaaactggacaaaatgaaactgctaaaaatgaaactgactaaaatgaaactgtgcaaaatgaaactggtaaaaatgaaactgggcgcgccatgcttcatcagactct

SEQ ID NO: 9297 - DNA, 188 bp, Artificial Sequence; identical to SEQ ID NO: 9296
  Synthetic polynucleotide

SEQ ID NO: 9298 - DNA, 197 bp, Artificial Sequence
  Synthetic polynucleotide
atcatctcaccttgcctcctgcatgattggacgggatgcctgcaggtgacccggaagtactagatgacccggaagtacttcgtgacccggaagtactgactgacccggaagtactctatgacccggaagtactacttgacccggaagtacttgctgacccggaagtactgtaggcgcgccatgcttcatcagactct

SEQ ID NO: 9299 - DNA, 197 bp, Artificial Sequence; identical to SEQ ID NO: 9298
  Synthetic polynucleotide

SEQ ID NO: 9300 - DNA, 197 bp, Artificial Sequence
  Synthetic polynucleotide
atcatctcaccttgcctcctgctacttacggtaggacacctgcaggtgagtcatatcgagaagatgagtcatatcgagatcgtgagtcatatcgagagactgagtcatatcgagactatgagtcatatcgagaacttgagtcatatcgagatgctgagtcatatcgagagtaggcgcgccatgcttcatcagactct

SEQ ID NO: 9301 - DNA, 197 bp, Artificial Sequence; identical to SEQ ID NO: 9300
  Synthetic polynucleotide

SEQ ID NO: 9302 - DNA, 191 bp, Artificial Sequence
  Synthetic polynucleotide
atcatctcaccttgcctcctgtaacagtatggccgcctcctgcaggtggaatgcgaggaatgtagatggaatgcgaggaatgttcgtggaatgcgaggaatgtgactggaatgcgaggaatgtctatggaatgcgaggaatgtacttggaatgcgaggaatgttgcggcgcgccatgcttcatcagactct

SEQ ID NO: 9303 - DNA, 191 bp, Artificial Sequence; identical to SEQ ID NO: 9302
  Synthetic polynucleotide

SEQ ID NO: 9304 - DNA, 198 bp, Artificial Sequence
  Synthetic polynucleotide
atcatctcaccttgcctcctgaaccttaaggccaggaacctgcaggtgtgacccttagcaaccgattaaagatgtgacccttagcaaccgattaatcgtgtgacccttagcaaccgattaagactgtgacccttagcaaccgattaactatgtgacccttagcaaccgattaaggcgcgccatgcttcatcagactct

SEQ ID NO: 9305 - DNA, 198 bp, Artificial Sequence; identical to SEQ ID NO: 9304
  Synthetic polynucleotide

SEQ ID NO: 9306 - DNA, 196 bp, Artificial Sequence
  Synthetic polynucleotide
atcatctcaccttgcctcctgagaggcgttggcaatgccctgcaggttccccctcacccagattccccctcaccctcgttccccctcacccgacttccccctcacccctattccccctcacccactttccccctcaccctgcttccccctcacccgtattccccctcacccggcgcgccatgcttcatcagactct

SEQ ID NO: 9307 - DNA, 196 bp, Artificial Sequence; identical to SEQ ID NO: 9306
  Synthetic polynucleotide

SEQ ID NO: 9308 - DNA, 156 bp, Artificial Sequence
  Synthetic polynucleotide
atcatctcaccttgcctcctgagtggcataatgagtgtcctgcaggtagttaacagatagttaactcgtagttaacgactagttaacctatagttaacacttagttaactgctagttaacgtatagttaacggcgcgccatgcttcatcagactct

SEQ ID NO: 9309 - DNA, 156 bp, Artificial Sequence; identical to SEQ ID NO: 9308
  Synthetic polynucleotide

SEQ ID NO: 9310 - DNA, 156 bp, Artificial Sequence
  Synthetic polynucleotide
atcatctcaccttgcctcctggtatgaacaacttcgaacctgcaggataacggtagaataacggttcgataacggtgacataacggtctaataacggtactataacggttgcataacggtgtaataacggtggcgcgccatgcttcatcagactct

SEQ ID NO: 9311 - DNA, 156 bp, Artificial Sequence; identical to SEQ ID NO: 9310
  Synthetic polynucleotide

SEQ ID NO: 9312 - DNA, 172 bp, Artificial Sequence
  Synthetic polynucleotide
atcatctcaccttgcctcctgcttcctgcaactgggcacctgcagggatcgatcccagagatcgatccctcggatcgatcccgacgatcgatcccctagatcgatcccactgatcgatccctgcgatcgatcccgtagatcgatcccggcgcgccatgcttcatcagactct

SEQ ID NO: 9313 - DNA, 172 bp, Artificial Sequence; identical to SEQ ID NO: 9312
  Synthetic polynucleotide

SEQ ID NO: 9314 - DNA, 172 bp, Artificial Sequence
  Synthetic polynucleotide
atcatctcaccttgcctcctgtcgtccagcgaagtgtgcctgcagggtcgtaaaatagagtcgtaaaattcggtcgtaaaatgacgtcgtaaaatctagtcgtaaaatactgtcgtaaaattgcgtcgtaaaatgtagtcgtaaaatggcgcgccatgcttcatcagactct

SEQ ID NO: 9315 - DNA, 172 bp, Artificial Sequence; identical to SEQ ID NO: 9314
  Synthetic polynucleotide

SEQ ID NO: 9316 - DNA, 190 bp, Artificial Sequence
  Synthetic polynucleotide
atcatctcaccttgcctcctgatgacgtatgccctggtcctgcaggggggtttccctaccagaggggtttccctacctcgggggtttccctaccgacggggtttccctaccctaggggtttccctaccactggggtttccctacctgcggggtttccctaccgtaggcgcgccatgcttcatcagactct

SEQ ID NO: 9317 - DNA, 190 bp, Artificial Sequence; identical to SEQ ID NO: 9316
  Synthetic polynucleotide

SEQ ID NO: 9318 - DNA, 186 bp, Artificial Sequence
  Synthetic polynucleotide
atcatctcaccttgcctcctgtgagcatctagggtccccctgcaggccccaaaccaccccccccccagaccccaaaccacccccccccctcgccccaaaccaccccccccccgacccccaaaccaccccccccccctaccccaaaccaccccccccccactggcgcgccatgcttcatcagactct

SEQ ID NO: 9319 - DNA, 186 bp, Artificial Sequence; identical to SEQ ID NO: 9318
  Synthetic polynucleotide

SEQ ID NO: 9320 - DNA, 188 bp, Artificial Sequence
  Synthetic polynucleotide
atcatctcaccttgcctcctgacacgaccacaatgtttcctgcaggagtgacgcaattagaagtgacgcaatttcgagtgacgcaattgacagtgacgcaattctaagtgacgcaattactagtgacgcaatttgcagtgacgcaattgtaagtgacgcaattggcgcgccatgcttcatcagactct

SEQ ID NO: 9321 - DNA, 188 bp, Artificial Sequence; identical to SEQ ID NO: 9320
  Synthetic polynucleotide

SEQ ID NO: 9322 - DNA, 197 bp, Artificial Sequence
  Synthetic polynucleotide
atcatctcaccttgcctcctgctgggttccctctaatgcctgcaggcatttcccggaagtgagacatttcccggaagtgtcgcatttcccggaagtggaccatttcccggaagtgctacatttcccggaagtgactcatttcccggaagtgtgccatttcccggaagtggtaggcgcgccatgcttcatcagactct

SEQ ID NO: 9323 - DNA, 197 bp, Artificial Sequence; identical to SEQ ID NO: 9322
  Synthetic polynucleotide

SEQ ID NO: 9324 - DNA, 188 bp, Artificial Sequence
  Synthetic polynucleotide
atcatctcaccttgcctcctgcccaagagacgcttgcacctgcaggtcccttttatctagatcccttttatcttcgtcccttttatctgactcccttttatctctatcccttttatctacttcccttttatcttgctcccttttatctgtatcccttttatctggcgcgccatgcttcatcagactct

SEQ ID NO: 9325 - DNA, 188 bp, Artificial Sequence; identical to SEQ ID NO: 9324
  Synthetic polynucleotide

SEQ ID NO: 9326 - DNA, 172 bp, Artificial Sequence
  Synthetic polynucleotide
atcatctcaccttgcctcctgcattagattatgcctgccctgcaggtagtgtcattagatagtgtcatttcgtagtgtcattgactagtgtcattctatagtgtcattacttagtgtcatttgctagtgtcattgtatagtgtcattggcgcgccatgcttcatcagactct

SEQ ID NO: 9327 - DNA, 172 bp, Artificial Sequence; identical to SEQ ID NO: 9326
  Synthetic polynucleotide

SEQ ID NO: 9328 - DNA, 196 bp, Artificial Sequence
  Synthetic polynucleotide
atcatctcaccttgcctcctggaatgcatttacacatccctgcaggaaattcctgggaaagaaaattcctgggaatcgaaattcctgggaagacaaattcctgggaactaaaattcctgggaaactaaattcctgggaatgcaaattcctgggaagtaaaattcctgggaaggcgcgccatgcttcatcagactct

SEQ ID NO: 9329 - DNA, 196 bp, Artificial Sequence; identical to SEQ ID NO: 9328
  Synthetic polynucleotide

SEQ ID NO: 9330 - DNA, 164 bp, Artificial Sequence
  Synthetic polynucleotide
atcatctcaccttgcctcctgctcacgagtgagtgtaacctgcaggtgtctggccagatgtctggcctcgtgtctggccgactgtctggccctatgtctggccacttgtctggcctgctgtctggccgtatgtctggccggcgcgccatgcttcatcagactct

SEQ ID NO: 9331 - DNA, 164 bp, Artificial Sequence; identical to SEQ ID NO: 9330
  Synthetic polynucleotide

SEQ ID NO: 9332 - DNA, 180 bp, Artificial Sequence
  Synthetic polynucleotide
atcatctcaccttgcctcctggggactatctctatcatcctgcaggaaccggaagtgagaaaccggaagtgtcgaaccggaagtggacaaccggaagtgctaaaccggaagtgactaaccggaagtgtgcaaccggaagtggtaaaccggaagtgggcgcgccatgcttcatcagactct

SEQ ID NO: 9333 - DNA, 180 bp, Artificial Sequence; identical to SEQ ID NO: 9332
  Synthetic polynucleotide

SEQ ID NO: 9334 - DNA, 190 bp, Artificial Sequence
  Synthetic polynucleotide
atcatctcaccttgcctcctgactcagacgtcctcgatcctgcaggaattggcgggaaaaagaaattggcgggaaaatcgaattggcgggaaaagacaattggcgggaaaactaaattggcgggaaaaactaattggcgggaaaatgcaattggcgggaaaagtaggcgcgccatgcttcatcagactct

SEQ ID NO: 9335 - DNA, 190 bp, Artificial Sequence; identical to SEQ ID NO: 9334
  Synthetic polynucleotide

SEQ ID NO: 9336 - DNA, 156 bp, Artificial Sequence
  Synthetic polynucleotide
atcatctcaccttgcctcctgtgtaattgttgcattcgcctgcaggtatcatatagatatcatattcgtatcatatgactatcatatctatatcatatacttatcatattgctatcatatgtatatcatatggcgcgccatgcttcatcagactct

SEQ ID NO: 9337 - DNA, 156 bp, Artificial Sequence; identical to SEQ ID NO: 9336
  Synthetic polynucleotide

SEQ ID NO: 9338 - DNA, 185 bp, Artificial Sequence
  Synthetic polynucleotide
atcatctcaccttgcctcctggcttaagaatgtctcatcctgcaggcccccccccccacttgagacccccccccccacttgtcgcccccccccccacttggaccccccccccccacttgctacccccccccccacttgactcccccccccccacttgtgcggcgcgccatgcttcatcagactct

SEQ ID NO: 9339 - DNA, 185 bp, Artificial Sequence; identical to SEQ ID NO: 9338
  Synthetic polynucleotide

SEQ ID NO: 9340 - DNA, 172 bp, Artificial Sequence
  Synthetic polynucleotide
atcatctcaccttgcctcctgcaatttcaccagcgtagcctgcaggacttccggttagaacttccggtttcgacttccggttgacacttccggttctaacttccggttactacttccggtttgcacttccggttgtaacttccggttggcgcgccatgcttcatcagactct

SEQ ID NO: 9341 - DNA, 172 bp, Artificial Sequence; identical to SEQ ID NO: 9340
  Synthetic polynucleotide

SEQ ID NO: 9342 - DNA, 172 bp, Artificial Sequence
  Synthetic polynucleotide
atcatctcaccttgcctcctgcagttcgtggtattctccctgcagggtaataaaaaagagtaataaaaatcggtaataaaaagacgtaataaaaactagtaataaaaaactgtaataaaaatgcgtaataaaaagtagtaataaaaaggcgcgccatgcttcatcagactct

SEQ ID NO: 9343 - DNA, 172 bp, Artificial Sequence; identical to SEQ ID NO: 9342
  Synthetic polynucleotide

SEQ ID NO: 9344 - DNA, 186 bp, Artificial Sequence
  Synthetic polynucleotide
atcatctcaccttgcctcctgagccctagcgccttacacctgcaggtgacctttgacctagttttgagatgacctttgacctagttttgtcgtgacctttgacctagttttggactgacctttgacctagttttgctatgacctttgacctagttttgactggcgcgccatgcttcatcagactct

SEQ ID NO: 9345 - DNA, 186 bp, Artificial Sequence; identical to SEQ ID NO: 9344
  Synthetic polynucleotide

SEQ ID NO: 9346 - DNA, 186 bp, Artificial Sequence
  Synthetic polynucleotide
atcatctcaccttgcctcctgcctttattccgacccgccctgcaggccccaaaccacccccccccaagaccccaaaccacccccccccatcgccccaaaccacccccccccagacccccaaaccacccccccccactaccccaaaccacccccccccaactggcgcgccatgcttcatcagactct

SEQ ID NO: 9347 - DNA, 186 bp, Artificial Sequence; identical to SEQ ID NO: 9346
  Synthetic polynucleotide

SEQ ID NO: 9348 - DNA, 172 bp, Artificial Sequence
  Synthetic polynucleotide
atcatctcaccttgcctcctggccttaattgcaactcgcctgcagggccgtgatttagagccgtgattttcggccgtgatttgacgccgtgatttctagccgtgatttactgccgtgattttgcgccgtgatttgtagccgtgatttggcgcgccatgcttcatcagactct

SEQ ID NO: 9349 - DNA, 172 bp, Artificial Sequence; identical to SEQ ID NO: 9348
  Synthetic polynucleotide

SEQ ID NO: 9350 - DNA, 172 bp, Artificial Sequence
  Synthetic polynucleotide
atcatctcaccttgcctcctgttccctaatactacctgcctgcagggagccggaagagagagccggaagtcggagccggaaggacgagccggaagctagagccggaagactgagccggaagtgcgagccggaaggtagagccggaagggcgcgccatgcttcatcagactct

SEQ ID NO: 9351 - DNA, 172 bp, Artificial Sequence; identical to SEQ ID NO: 9350
  Synthetic polynucleotide

SEQ ID NO: 9352 - DNA, 197 bp, Artificial Sequence
  Synthetic polynucleotide
atcatctcaccttgcctcctggtatatcggtagaggtgcctgcaggggaaaacgaaactgaagaggaaaacgaaactgatcgggaaaacgaaactgagacggaaaacgaaactgactaggaaaacgaaactgaactggaaaacgaaactgatgcggaaaacgaaactgagtaggcgcgccatgcttcatcagactct

SEQ ID NO: 9353 - DNA, 197 bp, Artificial Sequence; identical to SEQ ID NO: 9352
  Synthetic polynucleotide

SEQ ID NO: 9354 - DNA, 156 bp, Artificial Sequence
  Synthetic polynucleotide
atcatctcaccttgcctcctgaaagatcatgtgcacttcctgcaggtgtggtttagatgtggttttcgtgtggtttgactgtggtttctatgtggtttacttgtggttttgctgtggtttgtatgtggtttggcgcgccatgcttcatcagactct

SEQ ID NO: 9355 - DNA, 156 bp, Artificial Sequence; identical to SEQ ID NO: 9354
  Synthetic polynucleotide

SEQ ID NO: 9356 - DNA, 156 bp, Artificial Sequence
  Synthetic polynucleotide
atcatctcaccttgcctcctgtgcgggcctattaaagtcctgcaggtgcgtgacagatgcgtgactcgtgcgtgacgactgcgtgacctatgcgtgacacttgcgtgactgctgcgtgacgtatgcgtgacggcgcgccatgcttcatcagactct

SEQ ID NO: 9357 - DNA, 156 bp, Artificial Sequence; identical to SEQ ID NO: 9356
  Synthetic polynucleotide

SEQ ID NO: 9358 - DNA, 172 bp, Artificial Sequence
  Synthetic polynucleotide
atcatctcaccttgcctcctgggccatttgactctaaacctgcaggccctgaggcaagaccctgaggcatcgccctgaggcagacccctgaggcactaccctgaggcaactccctgaggcatgcccctgaggcagtaccctgaggcaggcgcgccatgcttcatcagactct

SEQ ID NO: 9359 - DNA, 172 bp, Artificial Sequence; identical to SEQ ID NO: 9358
  Synthetic polynucleotide

SEQ ID NO: 9360 - DNA, 197 bp, Artificial Sequence
  Synthetic polynucleotide
atcatctcaccttgcctcctggaatggcaatagtatctcctgcaggggtcacgcttggctgagaggtcacgcttggctgtcgggtcacgcttggctggacggtcacgcttggctgctaggtcacgcttggctgactggtcacgcttggctgtgcggtcacgcttggctggtaggcgcgccatgcttcatcagactct

SEQ ID NO: 9361 - DNA, 197 bp, Artificial Sequence; identical to SEQ ID NO: 9360
  Synthetic polynucleotide

SEQ ID NO: 9362 - DNA, 188 bp, Artificial Sequence
  Synthetic polynucleotide
atcatctcaccttgcctcctgagaagatatagacacggcctgcaggggctatttttaaagaggctatttttaatcgggctatttttaagacggctatttttaactaggctatttttaaactggctatttttaatgcggctatttttaagtaggctatttttaaggcgcgccatgcttcatcagactct

SEQ ID NO: 9363 - DNA, 188 bp, Artificial Sequence; identical to SEQ ID NO: 9362
  Synthetic polynucleotide

SEQ ID NO: 9364 - DNA, 185 bp, Artificial Sequence
  Synthetic polynucleotide
atcatctcaccttgcctcctgcgtagccttggattctacctgcaggcgcggtcacgtgacccagacgcggtcacgtgaccctcgcgcggtcacgtgacccgaccgcggtcacgtgacccctacgcggtcacgtgacccactcgcggtcacgtgaccctgcggcgcgccatgcttcatcagactct

SEQ ID NO: 9365 - DNA, 185 bp, Artificial Sequence; identical to SEQ ID NO: 9364
  Synthetic polynucleotide

SEQ ID NO: 9366 - DNA, 190 bp, Artificial Sequence
  Synthetic polynucleotide
atcatctcaccttgcctcctgaagtagcatgaggagatcctgcaggcccgcccccgccccagacccgcccccgcccctcgcccgcccccgccccgaccccgcccccgccccctacccgcccccgccccactcccgcccccgcccctgccccgcccccgccccgtaggcgcgccatgcttcatcagactct

SEQ ID NO: 9367 - DNA, 190 bp, Artificial Sequence; identical to SEQ ID NO: 9366
  Synthetic polynucleotide

SEQ ID NO: 9368 - DNA, 164 bp, Artificial Sequence
  Synthetic polynucleotide
atcatctcaccttgcctcctgcacccaactagtatttacctgcagggcacgtgcaagagcacgtgcatcggcacgtgcagacgcacgtgcactagcacgtgcaactgcacgtgcatgcgcacgtgcagtagcacgtgcaggcgcgccatgcttcatcagactct

SEQ ID NO: 9369 - DNA, 164 bp, Artificial Sequence; identical to SEQ ID NO: 9368
  Synthetic polynucleotide

SEQ ID NO: 9370 - DNA, 180 bp, Artificial Sequence
  Synthetic polynucleotide
atcatctcaccttgcctcctgcgagagtcttgtgtgcacctgcaggaagtaaacaaaagaaagtaaacaaatcgaagtaaacaaagacaagtaaacaaactaaagtaaacaaaactaagtaaacaaatgcaagtaaacaaagtaaagtaaacaaaggcgcgccatgcttcatcagactct

SEQ ID NO: 9371 - DNA, 180 bp, Artificial Sequence; identical to SEQ ID NO: 9370
  Synthetic polynucleotide

SEQ ID NO: 9372 - DNA, 180 bp, Artificial Sequence
  Synthetic polynucleotide
atcatctcaccttgcctcctggagagctctgaaacgtacctgcaggctcaccccaccagactcaccccacctcgctcaccccaccgacctcaccccaccctactcaccccaccactctcaccccacctgcctcaccccaccgtactcaccccaccggcgcgccatgcttcatcagactct

SEQ ID NO: 9373 - DNA, 180 bp, Artificial Sequence; identical to SEQ ID NO: 9372
  Synthetic polynucleotide

SEQ ID NO: 9374 - DNA, 190 bp, Artificial Sequence
  Synthetic polynucleotide
atcatctcaccttgcctcctgcccattcgtaagagtaacctgcaggctaatttgcatattagactaatttgcatatttcgctaatttgcatattgacctaatttgcatattctactaatttgcatattactctaatttgcatatttgcctaatttgcatattgtaggcgcgccatgcttcatcagactct

SEQ ID NO: 9375 - DNA, 190 bp, Artificial Sequence; identical to SEQ ID NO: 9374
  Synthetic polynucleotide

SEQ ID NO: 9376 - DNA, 140 bp, Artificial Sequence
  Synthetic polynucleotide
atcatctcaccttgcctcctgggattgaggctatactgcctgcaggaattagagaaattagtcgaattaggacaattagctaaattagactaattagtgcaattaggtaaattagggcgcgccatgcttcatcagactct

SEQ ID NO: 9377 - DNA, 140 bp, Artificial Sequence; identical to SEQ ID NO: 9376
  Synthetic polynucleotide

SEQ ID NO: 9378 - DNA, 191 bp, Artificial Sequence
  Synthetic polynucleotide
atcatctcaccttgcctcctgccaatgcaatctgagtacctgcaggtaaatgtaaacaaaggtagataaatgtaaacaaaggttcgtaaatgtaaacaaaggtgactaaatgtaaacaaaggtctataaatgtaaacaaaggtacttaaatgtaaacaaaggttgcggcgcgccatgcttcatcagactct

SEQ ID NO: 9379 - DNA, 191 bp, Artificial Sequence; identical to SEQ ID NO: 9378
  Synthetic polynucleotide

SEQ ID NO: 9380 - DNA, 185 bp, Artificial Sequence
  Synthetic polynucleotide
atcatctcaccttgcctcctgactagacagacagaccccctgcaggaaattttacgagctttagaaaattttacgagcttttcgaaattttacgagctttgacaaattttacgagctttctaaaattttacgagctttactaaattttacgagcttttgcggcgcgccatgcttcatcagactct

SEQ ID NO: 9381 - DNA, 185 bp, Artificial Sequence; identical to SEQ ID NO: 9380
  Synthetic polynucleotide

SEQ ID NO: 9382 - DNA, 140 bp, Artificial Sequence
  Synthetic polynucleotide
atcatctcaccttgcctcctggtggtactaatcttgtacctgcaggaattaaagaaattaatcgaattaagacaattaactaaattaaactaattaatgcaattaagtaaattaaggcgcgccatgcttcatcagactct

SEQ ID NO: 9383 - DNA, 140 bp, Artificial Sequence; identical to SEQ ID NO: 9382
  Synthetic polynucleotide

SEQ ID NO: 9384 - DNA, 196 bp, Artificial Sequence
  Synthetic polynucleotide
atcatctcaccttgcctcctgtattggccaagtacattcctgcagggaaccaggaagtgagagaaccaggaagtgtcggaaccaggaagtggacgaaccaggaagtgctagaaccaggaagtgactgaaccaggaagtgtgcgaaccaggaagtggtagaaccaggaagtgggcgcgccatgcttcatcagactct

SEQ ID NO: 9385 - DNA, 196 bp, Artificial Sequence; identical to SEQ ID NO: 9384
  Synthetic polynucleotide

SEQ ID NO: 9386 - DNA, 188 bp, Artificial Sequence
  Synthetic polynucleotide
atcatctcaccttgcctcctgagaacggtccattggatcctgcaggaatccccaccccagaaatccccacccctcgaatccccaccccgacaatccccaccccctaaatccccaccccactaatccccacccctgcaatccccaccccgtaaatccccaccccggcgcgccatgcttcatcagactct

SEQ ID NO: 9387 - DNA, 188 bp, Artificial Sequence; identical to SEQ ID NO: 9386
  Synthetic polynucleotide

SEQ ID NO: 9388 - DNA, 156 bp, Artificial Sequence
  Synthetic polynucleotide
atcatctcaccttgcctcctggcggcattgttaccgtccctgcaggaaaacaatagaaaaacaattcgaaaacaatgacaaaacaatctaaaaacaatactaaaacaattgcaaaacaatgtaaaaacaatggcgcgccatgcttcatcagactct

SEQ ID NO: 9389 - DNA, 156 bp, Artificial Sequence; identical to SEQ ID NO: 9388
  Synthetic polynucleotide

SEQ ID NO: 9390 - DNA, 172 bp, Artificial Sequence
  Synthetic polynucleotide
atcatctcaccttgcctcctgaggatattatggtcagccctgcaggacttccggtcagaacttccggtctcgacttccggtcgacacttccggtcctaacttccggtcactacttccggtctgcacttccggtcgtaacttccggtcggcgcgccatgcttcatcagactct

SEQ ID NO: 9391 - DNA, 172 bp, Artificial Sequence; identical to SEQ ID NO: 9390
  Synthetic polynucleotide

SEQ ID NO: 9392 - DNA, 172 bp, Artificial Sequence
  Synthetic polynucleotide
atcatctcaccttgcctcctgtgggctataatacgcatcctgcaggagacatgcctagaagacatgccttcgagacatgcctgacagacatgcctctaagacatgcctactagacatgccttgcagacatgcctgtaagacatgcctggcgcgccatgcttcatcagactct

SEQ ID NO: 9393 - DNA, 172 bp, Artificial Sequence; identical to SEQ ID NO: 9392
  Synthetic polynucleotide

SEQ ID NO: 9394 - DNA, 140 bp, Artificial Sequence
  Synthetic polynucleotide
atcatctcaccttgcctcctgctgttacactaggacctcctgcaggaattatagaaattattcgaattatgacaattatctaaattatactaattattgcaattatgtaaattatggcgcgccatgcttcatcagactct

SEQ ID NO: 9395 - DNA, 140 bp, Artificial Sequence; identical to SEQ ID NO: 9394
  Synthetic polynucleotide

SEQ ID NO: 9396 - DNA, 188 bp, Artificial Sequence
  Synthetic polynucleotide
atcatctcaccttgcctcctgcgcggtcgtagttcctacctgcaggaatccccacccgagaaatccccacccgtcgaatccccacccggacaatccccacccgctaaatccccacccgactaatccccacccgtgcaatccccacccggtaaatccccacccgggcgcgccatgcttcatcagactct

SEQ ID NO: 9397 - DNA, 188 bp, Artificial Sequence; identical to SEQ ID NO: 9396
  Synthetic polynucleotide

SEQ ID NO: 9398 - DNA, 172 bp, Artificial Sequence
  Synthetic polynucleotide
atcatctcaccttgcctcctgtttcatctctacgaactcctgcaggaccatatggcagaaccatatggctcgaccatatggcgacaccatatggcctaaccatatggcactaccatatggctgcaccatatggcgtaaccatatggcggcgcgccatgcttcatcagactct

SEQ ID NO: 9399 - DNA, 172 bp, Artificial Sequence; identical to SEQ ID NO: 9398
  Synthetic polynucleotide

SEQ ID NO: 9400 - DNA, 200 bp, Artificial Sequence
  Synthetic polynucleotide
atcatctcaccttgcctcctgagcacatactgtggtaacctgcaggtcgggtcattggggtcaggagatcgggtcattggggtcaggtcgtcgggtcattggggtcagggactcgggtcattggggtcaggctatcgggtcattggggtcaggacttcgggtcattggggtcaggggcgcgccatgcttcatcagactct

SEQ ID NO: 9401 - DNA, 200 bp, Artificial Sequence; identical to SEQ ID NO: 9400
  Synthetic polynucleotide

SEQ ID NO: 9402 - DNA, 164 bp, Artificial Sequence
  Synthetic polynucleotide
atcatctcaccttgcctcctgctgtgcacaatccgtggcctgcaggacacgtcacagaacacgtcactcgacacgtcacgacacacgtcacctaacacgtcacactacacgtcactgcacacgtcacgtaacacgtcacggcgcgccatgcttcatcagactct

SEQ ID NO: 9403 - DNA, 164 bp, Artificial Sequence; identical to SEQ ID NO: 9402
  Synthetic polynucleotide

SEQ ID NO: 9404 - DNA, 196 bp, Artificial Sequence
  Synthetic polynucleotide
atcatctcaccttgcctcctgagagttatatagcccatcctgcaggagtcatactgaaaagaagtcatactgaaatcgagtcatactgaaagacagtcatactgaaactaagtcatactgaaaactagtcatactgaaatgcagtcatactgaaagtaagtcatactgaaaggcgcgccatgcttcatcagactct

SEQ ID NO: 9405 - DNA, 196 bp, Artificial Sequence; identical to SEQ ID NO: 9404
  Synthetic polynucleotide

SEQ ID NO: 9406 - DNA, 172 bp, Artificial Sequence
  Synthetic polynucleotide
atcatctcaccttgcctcctgatgaacacccgtcaaaccctgcagggtattgttaaagagtattgttaatcggtattgttaagacgtattgttaactagtattgttaaactgtattgttaatgcgtattgttaagtagtattgttaaggcgcgccatgcttcatcagactct

SEQ ID NO: 9407 - DNA, 172 bp, Artificial Sequence; identical to SEQ ID NO: 9406
  Synthetic polynucleotide

SEQ ID NO: 9408 - DNA, 164 bp, Artificial Sequence
  Synthetic polynucleotide
atcatctcaccttgcctcctggggaatttgcctgctgccctgcaggtaggatagaagataggatagatcgtaggatagagactaggatagactataggatagaacttaggatagatgctaggatagagtataggatagaggcgcgccatgcttcatcagactct

SEQ ID NO: 9409 - DNA, 164 bp, Artificial Sequence; identical to SEQ ID NO: 9408
  Synthetic polynucleotide

SEQ ID NO: 9410 - DNA, 180 bp, Artificial Sequence
  Synthetic polynucleotide
atcatctcaccttgcctcctggggaggagactggagaacctgcaggcttgcgtgagaagacttgcgtgagatcgcttgcgtgagagaccttgcgtgagactacttgcgtgagaactcttgcgtgagatgccttgcgtgagagtacttgcgtgagaggcgcgccatgcttcatcagactct

SEQ ID NO: 9411 - DNA, 180 bp, Artificial Sequence; identical to SEQ ID NO: 9410
  Synthetic polynucleotide

SEQ ID NO: 9412 - DNA, 197 bp, Artificial Sequence
  Synthetic polynucleotide
atcatctcaccttgcctcctgagttcggtgctagtgaacctgcaggggggagggcgcgcggagaggggagggcgcgcggtcgggggagggcgcgcgggacggggagggcgcgcggctaggggagggcgcgcggactggggagggcgcgcggtgcggggagggcgcgcgggtaggcgcgccatgcttcatcagactct

SEQ ID NO: 9413 - DNA, 197 bp, Artificial Sequence; identical to SEQ ID NO: 9412
  Synthetic polynucleotide

SEQ ID NO: 9414 - DNA, 172 bp, Artificial Sequence
  Synthetic polynucleotide
atcatctcaccttgcctcctgcatgatatcgaccctctcctgcaggaccatatggtagaaccatatggttcgaccatatggtgacaccatatggtctaaccatatggtactaccatatggttgcaccatatggtgtaaccatatggtggcgcgccatgcttcatcagactct

SEQ ID NO: 9415 - DNA, 172 bp, Artificial Sequence; identical to SEQ ID NO: 9414
  Synthetic polynucleotide

SEQ ID NO: 9416 - DNA, 156 bp, Artificial Sequence
  Synthetic polynucleotide
atcatctcaccttgcctcctgcgagggaacgatctaagcctgcagggtgaatgaagagtgaatgatcggtgaatgagacgtgaatgactagtgaatgaactgtgaatgatgcgtgaatgagtagtgaatgaggcgcgccatgcttcatcagactct

SEQ ID NO: 9417 - DNA, 156 bp, Artificial Sequence; identical to SEQ ID NO: 9416
  Synthetic polynucleotide

SEQ ID NO: 9418 - DNA, 190 bp, Artificial Sequence
  Synthetic polynucleotide
atcatctcaccttgcctcctgtctaatgtagcggttgccctgcagggaccccccgctgtgagagaccccccgctgtgtcggaccccccgctgtggacgaccccccgctgtgctagaccccccgctgtgactgaccccccgctgtgtgcgaccccccgctgtggtaggcgcgccatgcttcatcagactct

SEQ ID NO: 9419 - DNA, 190 bp, Artificial Sequence; identical to SEQ ID NO: 9418
  Synthetic polynucleotide

SEQ ID NO: 9420 - DNA, 180 bp, Artificial Sequence
  Synthetic polynucleotide
atcatctcaccttgcctcctgcaataacagttgggcctcctgcaggagtacatgtttagaagtacatgttttcgagtacatgtttgacagtacatgtttctaagtacatgtttactagtacatgttttgcagtacatgtttgtaagtacatgtttggcgcgccatgcttcatcagactct

SEQ ID NO: 9421 - DNA, 180 bp, Artificial Sequence; identical to SEQ ID NO: 9420
  Synthetic polynucleotide

SEQ ID NO: 9422 - DNA, 185 bp, Artificial Sequence
  Synthetic polynucleotide
atcatctcaccttgcctcctgtgactttgtctgagggtcctgcagggtattgacaggtctttagagtattgacaggtcttttcggtattgacaggtctttgacgtattgacaggtctttctagtattgacaggtctttactgtattgacaggtcttttgcggcgcgccatgcttcatcagactct

SEQ ID NO: 9423 - DNA, 185 bp, Artificial Sequence; identical to SEQ ID NO: 9422
  Synthetic polynucleotide

SEQ ID NO: 9424 - DNA, 185 bp, Artificial Sequence
  Synthetic polynucleotide
atcatctcaccttgcctcctgccttgcagctacttggccctgcaggacgtacttcctgttttagaacgtacttcctgtttttcgacgtacttcctgttttgacacgtacttcctgttttctaacgtacttcctgttttactacgtacttcctgtttttgcggcgcgccatgcttcatcagactct

SEQ ID NO: 9425 - DNA, 185 bp, Artificial Sequence; identical to SEQ ID NO: 9424
  Synthetic polynucleotide

SEQ ID NO: 9426 - DNA, 164 bp, Artificial Sequence
  Synthetic polynucleotide
atcatctcaccttgcctcctgctcgcgaagatcttcttcctgcagggcctgaggcagagcctgaggctcggcctgaggcgacgcctgaggcctagcctgaggcactgcctgaggctgcgcctgaggcgtagcctgaggcggcgcgccatgcttcatcagactct

SEQ ID NO: 9427 - DNA, 164 bp, Artificial Sequence; identical to SEQ ID NO: 9426
  Synthetic polynucleotide

SEQ ID NO: 9428 - DNA, 156 bp, Artificial Sequence
  Synthetic polynucleotide
atcatctcaccttgcctcctgtgtacgaaaggtacacacctgcagggacgctgtagagacgctgttcggacgctgtgacgacgctgtctagacgctgtactgacgctgttgcgacgctgtgtagacgctgtggcgcgccatgcttcatcagactct

SEQ ID NO: 9429 - DNA, 156 bp, Artificial Sequence; identical to SEQ ID NO: 9428
  Synthetic polynucleotide

SEQ ID NO: 9430 - DNA, 190 bp, Artificial Sequence
  Synthetic polynucleotide
atcatctcaccttgcctcctggaccatcacagatgcggcctgcaggcaggatgagtcaccagacaggatgagtcacctcgcaggatgagtcaccgaccaggatgagtcaccctacaggatgagtcaccactcaggatgagtcacctgccaggatgagtcaccgtaggcgcgccatgcttcatcagactct

SEQ ID NO: 9431 - DNA, 190 bp, Artificial Sequence; identical to SEQ ID NO: 9430
  Synthetic polynucleotide

SEQ ID NO: 9432 - DNA, 188 bp, Artificial Sequence
  Synthetic polynucleotide
atcatctcaccttgcctcctggatcatggtacttacaacctgcaggcattacgtaacaagacattacgtaacatcgcattacgtaacagaccattacgtaacactacattacgtaacaactcattacgtaacatgccattacgtaacagtacattacgtaacaggcgcgccatgcttcatcagactct

SEQ ID NO: 9433 - DNA, 188 bp, Artificial Sequence; identical to SEQ ID NO: 9432
  Synthetic polynucleotide

SEQ ID NO: 9434 - DNA, 188 bp, Artificial Sequence
  Synthetic polynucleotide
atcatctcaccttgcctcctgatcgatcagagatctggcctgcaggcattacgtaaccagacattacgtaacctcgcattacgtaaccgaccattacgtaaccctacattacgtaaccactcattacgtaacctgccattacgtaaccgtacattacgtaaccggcgcgccatgcttcatcagactct

SEQ ID NO: 9435 - DNA, 188 bp, Artificial Sequence; identical to SEQ ID NO: 9434
  Synthetic polynucleotide

SEQ ID NO: 9436 - DNA, 164 bp, Artificial Sequence
  Synthetic polynucleotide
atcatctcaccttgcctcctgtagcctcaattggcacacctgcagggcacgtgacagagcacgtgactcggcacgtgacgacgcacgtgacctagcacgtgacactgcacgtgactgcgcacgtgacgtagcacgtgacggcgcgccatgcttcatcagactct

SEQ ID NO: 9437 - DNA, 164 bp, Artificial Sequence; identical to SEQ ID NO: 9436
  Synthetic polynucleotide

SEQ ID NO: 9438 - DNA, 172 bp, Artificial Sequence
  Synthetic polynucleotide
atcatctcaccttgcctcctgtactagcattatcagcgcctgcagggccaattaagagagccaattaagtcggccaattaaggacgccaattaagctagccaattaagactgccaattaagtgcgccaattaaggtagccaattaagggcgcgccatgcttcatcagactct

SEQ ID NO: 9439 - DNA, 172 bp, Artificial Sequence; identical to SEQ ID NO: 9438
  Synthetic polynucleotide

SEQ ID NO: 9440 - DNA, 197 bp, Artificial Sequence
  Synthetic polynucleotide
atcatctcaccttgcctcctgtataagggcttcttggtcctgcagggccccctggtggccaagagccccctggtggccatcggccccctggtggccagacgccccctggtggccactagccccctggtggccaactgccccctggtggccatgcgccccctggtggccagtaggcgcgccatgcttcatcagactct

SEQ ID NO: 9441 - DNA, 197 bp, Artificial Sequence; identical to SEQ ID NO: 9440
  Synthetic polynucleotide

SEQ ID NO: 9442 - DNA, 172 bp, Artificial Sequence
  Synthetic polynucleotide
atcatctcaccttgcctcctgagaggtttccaggttatcctgcaggtgcgcatgcgagatgcgcatgcgtcgtgcgcatgcggactgcgcatgcgctatgcgcatgcgacttgcgcatgcgtgctgcgcatgcggtatgcgcatgcgggcgcgccatgcttcatcagactct

SEQ ID NO: 9443 - DNA, 172 bp, Artificial Sequence; identical to SEQ ID NO: 9442
  Synthetic polynucleotide

SEQ ID NO: 9444 - DNA, 190 bp, Artificial Sequence
  Synthetic polynucleotide
atcatctcaccttgcctcctgggactactgagatgctacctgcaggaggaagattaccgcagaaggaagattaccgctcgaggaagattaccgcgacaggaagattaccgcctaaggaagattaccgcactaggaagattaccgctgcaggaagattaccgcgtaggcgcgccatgcttcatcagactct

SEQ ID NO: 9445 - DNA, 190 bp, Artificial Sequence; identical to SEQ ID NO: 9444
  Synthetic polynucleotide

SEQ ID NO: 9446 - DNA, 197 bp, Artificial Sequence
  Synthetic polynucleotide
atcatctcaccttgcctcctgctctacaatctcaggaacctgcaggcatttcctgagaaatagacatttcctgagaaattcgcatttcctgagaaatgaccatttcctgagaaatctacatttcctgagaaatactcatttcctgagaaattgccatttcctgagaaatgtaggcgcgccatgcttcatcagactct

SEQ ID NO: 9447 - DNA, 197 bp, Artificial Sequence; identical to SEQ ID NO: 9446
  Synthetic polynucleotide

SEQ ID NO: 9448 - DNA, 140 bp, Artificial Sequence
  Synthetic polynucleotide
atcatctcaccttgcctcctgtacagatactaccagatcctgcaggtgtcaaagatgtcaatcgtgtcaagactgtcaactatgtcaaacttgtcaatgctgtcaagtatgtcaaggcgcgccatgcttcatcagactct

SEQ ID NO: 9449 - DNA, 140 bp, Artificial Sequence; identical to SEQ ID NO: 9448
  Synthetic polynucleotide

SEQ ID NO: 9450 - DNA, 164 bp, Artificial Sequence
  Synthetic polynucleotide
atcatctcaccttgcctcctgtagcactgacgtacccgcctgcagggtggtgtctagagtggtgtcttcggtggtgtctgacgtggtgtctctagtggtgtctactgtggtgtcttgcgtggtgtctgtagtggtgtctggcgcgccatgcttcatcagactct

SEQ ID NO: 9451 - DNA, 164 bp, Artificial Sequence; identical to SEQ ID NO: 9450
  Synthetic polynucleotide

SEQ ID NO: 9452 - DNA, 156 bp, Artificial Sequence
  Synthetic polynucleotide
atcatctcaccttgcctcctgttgtgaaggattgtttccctgcagggtaccctaagagtaccctatcggtaccctagacgtaccctactagtaccctaactgtaccctatgcgtaccctagtagtaccctaggcgcgccatgcttcatcagactct

SEQ ID NO: 9453 - DNA, 156 bp, Artificial Sequence; identical to SEQ ID NO: 9452
  Synthetic polynucleotide

SEQ ID NO: 9454 - DNA, 180 bp, Artificial Sequence
  Synthetic polynucleotide
atcatctcaccttgcctcctgaagcgggattataaccgcctgcaggtgcctgaggctagatgcctgaggcttcgtgcctgaggctgactgcctgaggctctatgcctgaggctacttgcctgaggcttgctgcctgaggctgtatgcctgaggctggcgcgccatgcttcatcagactct

SEQ ID NO: 9455 - DNA, 180 bp, Artificial Sequence; identical to SEQ ID NO: 9454
  Synthetic polynucleotide

SEQ ID NO: 9456 - DNA, 172 bp, Artificial Sequence
  Synthetic polynucleotide
atcatctcaccttgcctcctgtttacaagaaaccgatgcctgcaggttgatacattagattgatacatttcgttgatacattgacttgatacattctattgatacattactttgatacatttgcttgatacattgtattgatacattggcgcgccatgcttcatcagactct

SEQ ID NO: 9457 - DNA, 172 bp, Artificial Sequence; identical to SEQ ID NO: 9456
  Synthetic polynucleotide

SEQ ID NO: 9458 - DNA, 180 bp, Artificial Sequence
  Synthetic polynucleotide
atcatctcaccttgcctcctgcacatcatctgggtaagcctgcaggggacatgtctcagaggacatgtctctcgggacatgtctcgacggacatgtctcctaggacatgtctcactggacatgtctctgcggacatgtctcgtaggacatgtctcggcgcgccatgcttcatcagactct

SEQ ID NO: 9459 - DNA, 180 bp, Artificial Sequence; identical to SEQ ID NO: 9458
  Synthetic polynucleotide

SEQ ID NO: 9460 - DNA, 172 bp, Artificial Sequence
  Synthetic polynucleotide
atcatctcaccttgcctcctgccgactgcacacctatgcctgcagggcggcggaggagagcggcggaggtcggcggcggagggacgcggcggaggctagcggcggaggactgcggcggaggtgcgcggcggagggtagcggcggaggggcgcgccatgcttcatcagactct

SEQ ID NO: 9461 - DNA, 172 bp, Artificial Sequence; identical to SEQ ID NO: 9460
  Synthetic polynucleotide

SEQ ID NO: 9462 - DNA, 164 bp, Artificial Sequence
  Synthetic polynucleotide
atcatctcaccttgcctcctgtccatggacccggtattcctgcaggagtaaacaaagaagtaaacaatcgagtaaacaagacagtaaacaactaagtaaacaaactagtaaacaatgcagtaaacaagtaagtaaacaaggcgcgccatgcttcatcagactct

SEQ ID NO: 9463 - DNA, 164 bp, Artificial Sequence; identical to SEQ ID NO: 9462
  Synthetic polynucleotide

SEQ ID NO: 9464 - DNA, 172 bp, Artificial Sequence
  Synthetic polynucleotide
atcatctcaccttgcctcctgagcacattggactcagccctgcagggtgtctggccagagtgtctggcctcggtgtctggccgacgtgtctggccctagtgtctggccactgtgtctggcctgcgtgtctggccgtagtgtctggccggcgcgccatgcttcatcagactct

SEQ ID NO: 9465 - DNA, 172 bp, Artificial Sequence; identical to SEQ ID NO: 9464
  Synthetic polynucleotide

SEQ ID NO: 9466 - DNA, 148 bp, Artificial Sequence
  Synthetic polynucleotide
atcatctcaccttgcctcctggccatactagataatgacctgcagggtataaaagagtataaatcggtataaagacgtataaactagtataaaactgtataaatgcgtataaagtagtataaaggcgcgccatgcttcatcagactct

SEQ ID NO: 9467 - DNA, 148 bp, Artificial Sequence; identical to SEQ ID NO: 9466
  Synthetic polynucleotide

SEQ ID NO: 9468 - DNA, 197 bp, Artificial Sequence
  Synthetic polynucleotide
atcatctcaccttgcctcctgtccgggataccttggaccctgcagggccccctggtggccgagagccccctggtggccgtcggccccctggtggccggacgccccctggtggccgctagccccctggtggccgactgccccctggtggccgtgcgccccctggtggccggtaggcgcgccatgcttcatcagactct

SEQ ID NO: 9469 - DNA, 197 bp, Artificial Sequence; identical to SEQ ID NO: 9468
  Synthetic polynucleotide

SEQ ID NO: 9470 - DNA, 185 bp, Artificial Sequence
  Synthetic polynucleotide
atcatctcaccttgcctcctgactcattcccagtgtgccctgcaggaaaaagtaaacaaaccagaaaaaagtaaacaaacctcgaaaaagtaaacaaaccgacaaaaagtaaacaaaccctaaaaaagtaaacaaaccactaaaaagtaaacaaacctgcggcgcgccatgcttcatcagactct

SEQ ID NO: 9471 - DNA, 185 bp, Artificial Sequence; identical to SEQ ID NO: 9470
  Synthetic polynucleotide

SEQ ID NO: 9472 - DNA, 180 bp, Artificial Sequence
  Synthetic polynucleotide
atcatctcaccttgcctcctgtaattgcttgtcgtgctcctgcaggcacttccgggtagacacttccgggttcgcacttccgggtgaccacttccgggtctacacttccgggtactcacttccgggttgccacttccgggtgtacacttccgggtggcgcgccatgcttcatcagactct

SEQ ID NO: 9473 - DNA, 180 bp, Artificial Sequence; identical to SEQ ID NO: 9472
  Synthetic polynucleotide

SEQ ID NO: 9474 - DNA, 191 bp, Artificial Sequence
  Synthetic polynucleotide
atcatctcaccttgcctcctgatgcgccataattctaacctgcaggccaccagggggcgccggagaccaccagggggcgccggtcgccaccagggggcgccgggacccaccagggggcgccggctaccaccagggggcgccggactccaccagggggcgccggtgcggcgcgccatgcttcatcagactct

SEQ ID NO: 9475 - DNA, 191 bp, Artificial Sequence; identical to SEQ ID NO: 9474
  Synthetic polynucleotide

SEQ ID NO: 9476 - DNA, 197 bp, Artificial Sequence
  Synthetic polynucleotide
atcatctcaccttgcctcctgcaccgacccagtacgaacctgcaggcccgcatacaacgaaagacccgcatacaacgaatcgcccgcatacaacgaagaccccgcatacaacgaactacccgcatacaacgaaactcccgcatacaacgaatgccccgcatacaacgaagtaggcgcgccatgcttcatcagactct

SEQ ID NO: 9477 - DNA, 197 bp, Artificial Sequence; identical to SEQ ID NO: 9476
  Synthetic polynucleotide

SEQ ID NO: 9478 - DNA, 191 bp, Artificial Sequence
  Synthetic polynucleotide
atcatctcaccttgcctcctgagaccctcggattcgtacctgcaggtcccaaagtagctgggaagatcccaaagtagctgggatcgtcccaaagtagctgggagactcccaaagtagctgggactatcccaaagtagctgggaacttcccaaagtagctgggatgcggcgcgccatgcttcatcagactct

SEQ ID NO: 9479 - DNA, 191 bp, Artificial Sequence; identical to SEQ ID NO: 9478
  Synthetic polynucleotide

SEQ ID NO: 9480 - DNA, 164 bp, Artificial Sequence
  Synthetic polynucleotide
atcatctcaccttgcctcctgtaaagtcagtgagtgaccctgcagggtgcgcgcgagagtgcgcgcgtcggtgcgcgcggacgtgcgcgcgctagtgcgcgcgactgtgcgcgcgtgcgtgcgcgcggtagtgcgcgcgggcgcgccatgcttcatcagactct

SEQ ID NO: 9481 - DNA, 164 bp, Artificial Sequence; identical to SEQ ID NO: 9480
  Synthetic polynucleotide

SEQ ID NO: 9482 - DNA, 197 bp, Artificial Sequence
  Synthetic polynucleotide
atcatctcaccttgcctcctgtgtgtgctgtacaggagcctgcaggttccaatttcccgccagattccaatttcccgcctcgttccaatttcccgccgacttccaatttcccgccctattccaatttcccgccactttccaatttcccgcctgcttccaatttcccgccgtaggcgcgccatgcttcatcagactct

SEQ ID NO: 9483 - DNA, 197 bp, Artificial Sequence; identical to SEQ ID NO: 9482
  Synthetic polynucleotide

SEQ ID NO: 9484 - DNA, 190 bp, Artificial Sequence
  Synthetic polynucleotide
atcatctcaccttgcctcctgtgtatagaggttgtagacctgcaggacaacagctgttgcagaacaacagctgttgctcgacaacagctgttgcgacacaacagctgttgcctaacaacagctgttgcactacaacagctgttgctgcacaacagctgttgcgtaggcgcgccatgcttcatcagactct

SEQ ID NO: 9485 - DNA, 190 bp, Artificial Sequence; identical to SEQ ID NO: 9484
  Synthetic polynucleotide

SEQ ID NO: 9486 - DNA, 164 bp, Artificial Sequence
  Synthetic polynucleotide
atcatctcaccttgcctcctgaggtcagactagaggcccctgcaggattacatgaagaattacatgatcgattacatgagacattacatgactaattacatgaactattacatgatgcattacatgagtaattacatgaggcgcgccatgcttcatcagactct

SEQ ID NO: 9487 - DNA, 164 bp, Artificial Sequence; identical to SEQ ID NO: 9486
  Synthetic polynucleotide

SEQ ID NO: 9488 - DNA, 172 bp, Artificial Sequence
  Synthetic polynucleotide
atcatctcaccttgcctcctgagtctgccaatgttggtcctgcaggtcatgcgggtagatcatgcgggttcgtcatgcgggtgactcatgcgggtctatcatgcgggtacttcatgcgggttgctcatgcgggtgtatcatgcgggtggcgcgccatgcttcatcagactct

SEQ ID NO: 9489 - DNA, 172 bp, Artificial Sequence; identical to SEQ ID NO: 9488
  Synthetic polynucleotide

SEQ ID NO: 9490 - DNA, 190 bp, Artificial Sequence
  Synthetic polynucleotide
atcatctcaccttgcctcctgtcaacttgtcatggactcctgcagggaggtcatgaccccagagaggtcatgacccctcggaggtcatgaccccgacgaggtcatgaccccctagaggtcatgaccccactgaggtcatgacccctgcgaggtcatgaccccgtaggcgcgccatgcttcatcagactct

SEQ ID NO: 9491 - DNA, 190 bp, Artificial Sequence; identical to SEQ ID NO: 9490
  Synthetic polynucleotide

SEQ ID NO: 9492 - DNA, 148 bp, Artificial Sequence
  Synthetic polynucleotide
atcatctcaccttgcctcctggacaaatgcggactggacctgcagggccattaagagccattatcggccattagacgccattactagccattaactgccattatgcgccattagtagccattaggcgcgccatgcttcatcagactct

SEQ ID NO: 9493 - DNA, 148 bp, Artificial Sequence; identical to SEQ ID NO: 9492
  Synthetic polynucleotide

SEQ ID NO: 9494 - DNA, 172 bp, Artificial Sequence
  Synthetic polynucleotide
atcatctcaccttgcctcctggtggagtcgattagtggcctgcaggtaatgtattaagataatgtattatcgtaatgtattagactaatgtattactataatgtattaacttaatgtattatgctaatgtattagtataatgtattaggcgcgccatgcttcatcagactct

SEQ ID NO: 9495 - DNA, 172 bp, Artificial Sequence; identical to SEQ ID NO: 9494
  Synthetic polynucleotide

SEQ ID NO: 9496 - DNA, 164 bp, Artificial Sequence
  Synthetic polynucleotide
atcatctcaccttgcctcctgatatgcggttggcgcaacctgcaggtaattaattagataattaatttcgtaattaattgactaattaattctataattaattacttaattaatttgctaattaattgtataattaattggcgcgccatgcttcatcagactct

SEQ ID NO: 9497 - DNA, 164 bp, Artificial Sequence; identical to SEQ ID NO: 9496
  Synthetic polynucleotide

SEQ ID NO: 9498 - DNA, 140 bp, Artificial Sequence
  Synthetic polynucleotide
atcatctcaccttgcctcctgcaatccatagagatagccctgcaggtgttatagatgttattcgtgttatgactgttatctatgttatacttgttattgctgttatgtatgttatggcgcgccatgcttcatcagactct

SEQ ID NO: 9499 - DNA, 140 bp, Artificial Sequence; identical to SEQ ID NO: 9498
  Synthetic polynucleotide

SEQ ID NO: 9500 - DNA, 156 bp, Artificial Sequence
  Synthetic polynucleotide
atcatctcaccttgcctcctgagtaaagtctgtgagtccctgcaggaacctcgcagaaacctcgctcgaacctcgcgacaacctcgcctaaacctcgcactaacctcgctgcaacctcgcgtaaacctcgcggcgcgccatgcttcatcagactct

SEQ ID NO: 9501 - DNA, 156 bp, Artificial Sequence; identical to SEQ ID NO: 9500
  Synthetic polynucleotide

SEQ ID NO: 9502 - DNA, 191 bp, Artificial Sequence
  Synthetic polynucleotide
atcatctcaccttgcctcctgtgttaaccggagagggtcctgcagggaggggggcggggctaaagagaggggggcggggctaatcggaggggggcggggctaagacgaggggggcggggctaactagaggggggcggggctaaactgaggggggcggggctaatgcggcgcgccatgcttcatcagactct

SEQ ID NO: 9503 - DNA, 191 bp, Artificial Sequence; identical to SEQ ID NO: 9502
  Synthetic polynucleotide

SEQ ID NO: 9504 - DNA, 197 bp, Artificial Sequence
  Synthetic polynucleotide
atcatctcaccttgcctcctggaggcaccttcacggatcctgcaggaaataaatcacagcaagaaaataaatcacagcatcgaaataaatcacagcagacaaataaatcacagcactaaaataaatcacagcaactaaataaatcacagcatgcaaataaatcacagcagtaggcgcgccatgcttcatcagactct

SEQ ID NO: 9505 - DNA, 197 bp, Artificial Sequence; identical to SEQ ID NO: 9504
  Synthetic polynucleotide

SEQ ID NO: 9506 - DNA, 172 bp, Artificial Sequence
  Synthetic polynucleotide
atcatctcaccttgcctcctgcctttgacgccgacttacctgcaggcggtaattggagacggtaattggtcgcggtaattgggaccggtaattggctacggtaattggactcggtaattggtgccggtaattgggtacggtaattggggcgcgccatgcttcatcagactct

SEQ ID NO: 9507 - DNA, 172 bp, Artificial Sequence; identical to SEQ ID NO: 9506
  Synthetic polynucleotide

SEQ ID NO: 9508 - DNA, 164 bp, Artificial Sequence
  Synthetic polynucleotide
atcatctcaccttgcctcctggatgtcgtcgcatgagacctgcaggagaggtcaaagaagaggtcaatcgagaggtcaagacagaggtcaactaagaggtcaaactagaggtcaatgcagaggtcaagtaagaggtcaaggcgcgccatgcttcatcagactct

SEQ ID NO: 9509 - DNA, 164 bp, Artificial Sequence; identical to SEQ ID NO: 9508
  Synthetic polynucleotide

SEQ ID NO: 9510 - DNA, 172 bp, Artificial Sequence
  Synthetic polynucleotide
atcatctcaccttgcctcctgtgacccaatggagatgccctgcagggtggggtgatagagtggggtgattcggtggggtgatgacgtggggtgatctagtggggtgatactgtggggtgattgcgtggggtgatgtagtggggtgatggcgcgccatgcttcatcagactct

SEQ ID NO: 9511 - DNA, 172 bp, Artificial Sequence; identical to SEQ ID NO: 9510
  Synthetic polynucleotide

SEQ ID NO: 9512 - DNA, 164 bp, Artificial Sequence
  Synthetic polynucleotide
atcatctcaccttgcctcctgaaatacgtatatcgggccctgcaggagaggtcacagaagaggtcactcgagaggtcacgacagaggtcacctaagaggtcacactagaggtcactgcagaggtcacgtaagaggtcacggcgcgccatgcttcatcagactct

SEQ ID NO: 9513 - DNA, 164 bp, Artificial Sequence; identical to SEQ ID NO: 9512
  Synthetic polynucleotide

SEQ ID NO: 9514 - DNA, 196 bp, Artificial Sequence
  Synthetic polynucleotide
atcatctcaccttgcctcctggattccgacatgtcgaacctgcaggtttttaattggttagatttttaattggtttcgtttttaattggttgactttttaattggttctatttttaattggttacttttttaattggtttgctttttaattggttgtatttttaattggttggcgcgccatgcttcatcagactct

SEQ ID NO: 9515 - DNA, 196 bp, Artificial Sequence; identical to SEQ ID NO: 9514
  Synthetic polynucleotide

SEQ ID NO: 9516 - DNA, 148 bp, Artificial Sequence
  Synthetic polynucleotide
atcatctcaccttgcctcctggcccgtcttagtaaattcctgcaggcgttggcagacgttggctcgcgttggcgaccgttggcctacgttggcactcgttggctgccgttggcgtacgttggcggcgcgccatgcttcatcagactct

SEQ ID NO: 9517 - DNA, 148 bp, Artificial Sequence; identical to SEQ ID NO: 9516
  Synthetic polynucleotide

SEQ ID NO: 9518 - DNA, 190 bp, Artificial Sequence
  Synthetic polynucleotide
atcatctcaccttgcctcctgcttagggacgctcagatcctgcaggggggcaaagttcaaagaggggcaaagttcaatcgggggcaaagttcaagacggggcaaagttcaactaggggcaaagttcaaactggggcaaagttcaatgcggggcaaagttcaagtaggcgcgccatgcttcatcagactct

SEQ ID NO: 9519 - DNA, 190 bp, Artificial Sequence; identical to SEQ ID NO: 9518
  Synthetic polynucleotide

SEQ ID NO: 9520 - DNA, 172 bp, Artificial Sequence
  Synthetic polynucleotide
atcatctcaccttgcctcctggtcattagtcgtctggtcctgcaggggtgactcatagaggtgactcattcgggtgactcatgacggtgactcatctaggtgactcatactggtgactcattgcggtgactcatgtaggtgactcatggcgcgccatgcttcatcagactct

SEQ ID NO: 9521 - DNA, 172 bp, Artificial Sequence; identical to SEQ ID NO: 9520
  Synthetic polynucleotide

SEQ ID NO: 9522 - DNA, 180 bp, Artificial Sequence
  Synthetic polynucleotide
atcatctcaccttgcctcctgaatctaccggcattacccctgcagggccacgtggccagagccacgtggcctcggccacgtggccgacgccacgtggccctagccacgtggccactgccacgtggcctgcgccacgtggccgtagccacgtggccggcgcgccatgcttcatcagactct

SEQ ID NO: 9523 - DNA, 180 bp, Artificial Sequence; identical to SEQ ID NO: 9522
  Synthetic polynucleotide

SEQ ID NO: 9524 - DNA, 172 bp, Artificial Sequence
  Synthetic polynucleotide
atcatctcaccttgcctcctggaactagcagacgaccccctgcaggggtgactcagagaggtgactcagtcgggtgactcaggacggtgactcagctaggtgactcagactggtgactcagtgcggtgactcaggtaggtgactcagggcgcgccatgcttcatcagactct

SEQ ID NO: 9525 - DNA, 172 bp, Artificial Sequence; identical to SEQ ID NO: 9524
  Synthetic polynucleotide

SEQ ID NO: 9526 - DNA, 164 bp, Artificial Sequence
  Synthetic polynucleotide
atcatctcaccttgcctcctgttcaaacgcggaatcaccctgcaggtcattagggagatcattagggtcgtcattaggggactcattagggctatcattagggacttcattagggtgctcattaggggtatcattagggggcgcgccatgcttcatcagactct

SEQ ID NO: 9527 - DNA, 164 bp, Artificial Sequence; identical to SEQ ID NO: 9526
  Synthetic polynucleotide

SEQ ID NO: 9528 - DNA, 164 bp, Artificial Sequence
  Synthetic polynucleotide
atcatctcaccttgcctcctgtattaccctctagctaacctgcaggcccaaaattagacccaaaatttcgcccaaaattgaccccaaaattctacccaaaattactcccaaaatttgccccaaaattgtacccaaaattggcgcgccatgcttcatcagactct

SEQ ID NO: 9529 - DNA, 164 bp, Artificial Sequence; identical to SEQ ID NO: 9528
  Synthetic polynucleotide

SEQ ID NO: 9530 - DNA, 190 bp, Artificial Sequence
  Synthetic polynucleotide
atcatctcaccttgcctcctgggttgatccttctattgcctgcaggttgccctagggcatagattgccctagggcattcgttgccctagggcatgacttgccctagggcatctattgccctagggcatactttgccctagggcattgcttgccctagggcatgtaggcgcgccatgcttcatcagactct

SEQ ID NO: 9531 - DNA, 190 bp, Artificial Sequence; identical to SEQ ID NO: 9530
  Synthetic polynucleotide

SEQ ID NO: 9532 - DNA, 172 bp, Artificial Sequence
  Synthetic polynucleotide
atcatctcaccttgcctcctgctagtgagccatcgatccctgcagggtcgtaaaaaagagtcgtaaaaatcggtcgtaaaaagacgtcgtaaaaactagtcgtaaaaaactgtcgtaaaaatgcgtcgtaaaaagtagtcgtaaaaaggcgcgccatgcttcatcagactct

SEQ ID NO: 9533 - DNA, 172 bp, Artificial Sequence; identical to SEQ ID NO: 9532
  Synthetic polynucleotide

SEQ ID NO: 9534 - DNA, 156 bp, Artificial Sequence
  Synthetic polynucleotide
atcatctcaccttgcctcctgaagaccgaatatggctgcctgcaggatgcatatagaatgcatattcgatgcatatgacatgcatatctaatgcatatactatgcatattgcatgcatatgtaatgcatatggcgcgccatgcttcatcagactct

SEQ ID NO: 9535 - DNA, 156 bp, Artificial Sequence; identical to SEQ ID NO: 9534
  Synthetic polynucleotide

SEQ ID NO: 9536 - DNA, 179 bp, Artificial Sequence
  Synthetic polynucleotide
atcatctcaccttgcctcctgttagtcctgatttacagcctgcaggattggccagcgtggctgtcagtcaagaattggccagcgtggctgtcagtcatcgattggccagcgtggctgtcagtcagacattggccagcgtggctgtcagtcactaggcgcgccatgcttcatcagactct

SEQ ID NO: 9537 - DNA, 179 bp, Artificial Sequence; identical to SEQ ID NO: 9536
  Synthetic polynucleotide

SEQ ID NO: 9538 - DNA, 191 bp, Artificial Sequence
  Synthetic polynucleotide
atcatctcaccttgcctcctgtgatcctatcacccggacctgcaggatccacaggtgcgaaaaagaatccacaggtgcgaaaatcgatccacaggtgcgaaaagacatccacaggtgcgaaaactaatccacaggtgcgaaaaactatccacaggtgcgaaaatgcggcgcgccatgcttcatcagactct

SEQ ID NO: 9539 - DNA, 191 bp, Artificial Sequence; identical to SEQ ID NO: 9538
  Synthetic polynucleotide

SEQ ID NO: 9540 - DNA, 196 bp, Artificial Sequence
  Synthetic polynucleotide
atcatctcaccttgcctcctgcaaggcgcgacttattccctgcaggtggaaatttccatagatggaaatttccattcgtggaaatttccatgactggaaatttccatctatggaaatttccatacttggaaatttccattgctggaaatttccatgtatggaaatttccatggcgcgccatgcttcatcagactct

SEQ ID NO: 9541 - DNA, 196 bp, Artificial Sequence; identical to SEQ ID NO: 9540
  Synthetic polynucleotide

SEQ ID NO: 9542 - DNA, 180 bp, Artificial Sequence
  Synthetic polynucleotide
atcatctcaccttgcctcctggcaggttggcctaaagtcctgcaggttaacggttatagattaacggttattcgttaacggttatgacttaacggttatctattaacggttatactttaacggttattgcttaacggttatgtattaacggttatggcgcgccatgcttcatcagactct

SEQ ID NO: 9543 - DNA, 180 bp, Artificial Sequence; identical to SEQ ID NO: 9542
  Synthetic polynucleotide

SEQ ID NO: 9544 - DNA, 172 bp, Artificial Sequence
  Synthetic polynucleotide
atcatctcaccttgcctcctgcagagggtaaatattgtcctgcagggccaattaacagagccaattaactcggccaattaacgacgccaattaacctagccaattaacactgccaattaactgcgccaattaacgtagccaattaacggcgcgccatgcttcatcagactct

SEQ ID NO: 9545 - DNA, 172 bp, Artificial Sequence; identical to SEQ ID NO: 9544
  Synthetic polynucleotide

SEQ ID NO: 9546 - DNA, 185 bp, Artificial Sequence
  Synthetic polynucleotide
atcatctcaccttgcctcctggaacgtgatatatcctacctgcaggatcattcattcatagtagaatcattcattcatagttcgatcattcattcatagtgacatcattcattcatagtctaatcattcattcatagtactatcattcattcatagttgcggcgcgccatgcttcatcagactct

SEQ ID NO: 9547 - DNA, 185 bp, Artificial Sequence; identical to SEQ ID NO: 9546
  Synthetic polynucleotide

SEQ ID NO: 9548 - DNA, 191 bp, Artificial Sequence
  Synthetic polynucleotide
atcatctcaccttgcctcctgaacacgtagcacgtttacctgcaggtggcgccccctggtggcagatggcgccccctggtggctcgtggcgccccctggtggcgactggcgccccctggtggcctatggcgccccctggtggcacttggcgccccctggtggctgcggcgcgccatgcttcatcagactct

SEQ ID NO: 9549 - DNA, 191 bp, Artificial Sequence; identical to SEQ ID NO: 9548
  Synthetic polynucleotide

SEQ ID NO: 9550 - DNA, 156 bp, Artificial Sequence
  Synthetic polynucleotide
atcatctcaccttgcctcctgactctaagaaagttccacctgcaggatcacgtgagaatcacgtgtcgatcacgtggacatcacgtgctaatcacgtgactatcacgtgtgcatcacgtggtaatcacgtgggcgcgccatgcttcatcagactct

SEQ ID NO: 9551 - DNA, 156 bp, Artificial Sequence; identical to SEQ ID NO: 9550
  Synthetic polynucleotide

SEQ ID NO: 9552 - DNA, 164 bp, Artificial Sequence
  Synthetic polynucleotide
atcatctcaccttgcctcctgtatgtttgtgtgccacgcctgcaggtctaacggcagatctaacggctcgtctaacggcgactctaacggcctatctaacggcacttctaacggctgctctaacggcgtatctaacggcggcgcgccatgcttcatcagactct

SEQ ID NO: 9553 - DNA, 164 bp, Artificial Sequence; identical to SEQ ID NO: 9552
  Synthetic polynucleotide

SEQ ID NO: 9554 - DNA, 197 bp, Artificial Sequence
  Synthetic polynucleotide
atcatctcaccttgcctcctgaggcagtcgtcgtattgcctgcaggaagtgcttccgggtcagaaagtgcttccgggtctcgaagtgcttccgggtcgacaagtgcttccgggtcctaaagtgcttccgggtcactaagtgcttccgggtctgcaagtgcttccgggtcgtaggcgcgccatgcttcatcagactct

SEQ ID NO: 9555 - DNA, 197 bp, Artificial Sequence; identical to SEQ ID NO: 9554
  Synthetic polynucleotide

SEQ ID NO: 9556 - DNA, 190 bp, Artificial Sequence
  Synthetic polynucleotide
atcatctcaccttgcctcctgatctgtgtgcaaatcttcctgcaggacgcgcctcgggcgagaacgcgcctcgggcgtcgacgcgcctcgggcggacacgcgcctcgggcgctaacgcgcctcgggcgactacgcgcctcgggcgtgcacgcgcctcgggcggtaggcgcgccatgcttcatcagactct

SEQ ID NO: 9557 - DNA, 190 bp, Artificial Sequence; identical to SEQ ID NO: 9556
  Synthetic polynucleotide

SEQ ID NO: 9558 - DNA, 185 bp, Artificial Sequence
  Synthetic polynucleotide
atcatctcaccttgcctcctgtagactcctagctgattcctgcaggtgaccttttgacctttagatgaccttttgaccttttcgtgaccttttgacctttgactgaccttttgacctttctatgaccttttgacctttacttgaccttttgaccttttgcggcgcgccatgcttcatcagactct

SEQ ID NO: 9559 - DNA, 185 bp, Artificial Sequence; identical to SEQ ID NO: 9558
  Synthetic polynucleotide

SEQ ID NO: 9560 - DNA, 172 bp, Artificial Sequence
  Synthetic polynucleotide
atcatctcaccttgcctcctggtcgtttcaaggccagccctgcaggggtaattaacagaggtaattaactcgggtaattaacgacggtaattaacctaggtaattaacactggtaattaactgcggtaattaacgtaggtaattaacggcgcgccatgcttcatcagactct

SEQ ID NO: 9561 - DNA, 172 bp, Artificial Sequence; identical to SEQ ID NO: 9560
  Synthetic polynucleotide

SEQ ID NO: 9562 - DNA, 197 bp, Artificial Sequence
  Synthetic polynucleotide
atcatctcaccttgcctcctgtgactaccctattcgaccctgcaggggcgggaaattggaaagaggcgggaaattggaatcgggcgggaaattggaagacggcgggaaattggaactaggcgggaaattggaaactggcgggaaattggaatgcggcgggaaattggaagtaggcgcgccatgcttcatcagactct

SEQ ID NO: 9563 - DNA, 197 bp, Artificial Sequence; identical to SEQ ID NO: 9562
  Synthetic polynucleotide

SEQ ID NO: 9564 - DNA, 172 bp, Artificial Sequence
  Synthetic polynucleotide
atcatctcaccttgcctcctgggttacgagattcttctcctgcaggggtaattaaaagaggtaattaaatcgggtaattaaagacggtaattaaactaggtaattaaaactggtaattaaatgcggtaattaaagtaggtaattaaaggcgcgccatgcttcatcagactct

SEQ ID NO: 9565 - DNA, 172 bp, Artificial Sequence; identical to SEQ ID NO: 9564
  Synthetic polynucleotide

SEQ ID NO: 9566 - DNA, 172 bp, Artificial Sequence
  Synthetic polynucleotide
atcatctcaccttgcctcctgcaagttcattctcattccctgcaggggtaattaagagaggtaattaagtcgggtaattaaggacggtaattaagctaggtaattaagactggtaattaagtgcggtaattaaggtaggtaattaagggcgcgccatgcttcatcagactct

SEQ ID NO: 9567 - DNA, 172 bp, Artificial Sequence; identical to SEQ ID NO: 9566
  Synthetic polynucleotide

SEQ ID NO: 9568 - DNA, 185 bp, Artificial Sequence
  Synthetic polynucleotide
atcatctcaccttgcctcctgtctgtccagttagagctcctgcaggtttcattttcttttttagatttcattttctttttttcgtttcattttcttttttgactttcattttcttttttctatttcattttcttttttacttttcattttctttttttgcggcgcgccatgcttcatcagactct

SEQ ID NO: 9569 - DNA, 185 bp, Artificial Sequence; identical to SEQ ID NO: 9568
  Synthetic polynucleotide

SEQ ID NO: 9570 - DNA, 185 bp, Artificial Sequence
  Synthetic polynucleotide
atcatctcaccttgcctcctgcacctggagaaggctctcctgcaggaacaatgaatattgttagaaacaatgaatattgtttcgaacaatgaatattgttgacaacaatgaatattgttctaaacaatgaatattgttactaacaatgaatattgtttgcggcgcgccatgcttcatcagactct

SEQ ID NO: 9571 - DNA, 185 bp, Artificial Sequence; identical to SEQ ID NO: 9570
  Synthetic polynucleotide

SEQ ID NO: 9572 - DNA, 156 bp, Artificial Sequence
  Synthetic polynucleotide
atcatctcaccttgcctcctgatagaggccctcaggagcctgcaggacagcgctagaacagcgcttcgacagcgctgacacagcgctctaacagcgctactacagcgcttgcacagcgctgtaacagcgctggcgcgccatgcttcatcagactct

SEQ ID NO: 9573 - DNA, 156 bp, Artificial Sequence; identical to SEQ ID NO: 9572
  Synthetic polynucleotide

SEQ ID NO: 9574 - DNA, 185 bp, Artificial Sequence
  Synthetic polynucleotide
atcatctcaccttgcctcctgaactgttggacagattgcctgcaggggtttgtttactttttagaggtttgtttacttttttcgggtttgtttactttttgacggtttgtttactttttctaggtttgtttactttttactggtttgtttacttttttgcggcgcgccatgcttcatcagactct

SEQ ID NO: 9575 - DNA, 185 bp, Artificial Sequence; identical to SEQ ID NO: 9574
  Synthetic polynucleotide

SEQ ID NO: 9576 - DNA, 185 bp, Artificial Sequence
  Synthetic polynucleotide
atcatctcaccttgcctcctgatacgccttcagcgtcccctgcaggatgagctaattaccttagaatgagctaattacctttcgatgagctaattaccttgacatgagctaattaccttctaatgagctaattaccttactatgagctaattacctttgcggcgcgccatgcttcatcagactct

SEQ ID NO: 9577 - DNA, 185 bp, Artificial Sequence; identical to SEQ ID NO: 9576
  Synthetic polynucleotide

SEQ ID NO: 9578 - DNA, 172 bp, Artificial Sequence
  Synthetic polynucleotide
atcatctcaccttgcctcctgttaagcaggacgtagatcctgcaggggggtcacggagaggggtcacggtcgggggtcacgggacggggtcacggctaggggtcacggactggggtcacggtgcggggtcacgggtaggggtcacggggcgcgccatgcttcatcagactct

SEQ ID NO: 9579 - DNA, 172 bp, Artificial Sequence; identical to SEQ ID NO: 9578
  Synthetic polynucleotide

SEQ ID NO: 9580 - DNA, 188 bp, Artificial Sequence
  Synthetic polynucleotide
atcatctcaccttgcctcctgtcagcgattctacggatcctgcaggtatagacgcgcaagatatagacgcgcatcgtatagacgcgcagactatagacgcgcactatatagacgcgcaacttatagacgcgcatgctatagacgcgcagtatatagacgcgcaggcgcgccatgcttcatcagactct

SEQ ID NO: 9581 - DNA, 188 bp, Artificial Sequence; identical to SEQ ID NO: 9580
  Synthetic polynucleotide

SEQ ID NO: 9582 - DNA, 180 bp, Artificial Sequence
  Synthetic polynucleotide
atcatctcaccttgcctcctgacagtggcctactccaccctgcagggtcatgtgaccagagtcatgtgacctcggtcatgtgaccgacgtcatgtgaccctagtcatgtgaccactgtcatgtgacctgcgtcatgtgaccgtagtcatgtgaccggcgcgccatgcttcatcagactct

SEQ ID NO: 9583 - DNA, 180 bp, Artificial Sequence; identical to SEQ ID NO: 9582
  Synthetic polynucleotide

SEQ ID NO: 9584 - DNA, 190 bp, Artificial Sequence
  Synthetic polynucleotide
atcatctcaccttgcctcctggagcgttcgggaacgatcctgcaggtgacagttttacgaagatgacagttttacgatcgtgacagttttacgagactgacagttttacgactatgacagttttacgaacttgacagttttacgatgctgacagttttacgagtaggcgcgccatgcttcatcagactct

SEQ ID NO: 9585 - DNA, 190 bp, Artificial Sequence; identical to SEQ ID NO: 9584
  Synthetic polynucleotide

SEQ ID NO: 9586 - DNA, 156 bp, Artificial Sequence
  Synthetic polynucleotide
atcatctcaccttgcctcctggatactgggaacactcccctgcaggctagttaaagactagttaatcgctagttaagacctagttaactactagttaaactctagttaatgcctagttaagtactagttaaggcgcgccatgcttcatcagactct

SEQ ID NO: 9587 - DNA, 156 bp, Artificial Sequence; identical to SEQ ID NO: 9586
  Synthetic polynucleotide

SEQ ID NO: 9588 - DNA, 191 bp, Artificial Sequence
  Synthetic polynucleotide
atcatctcaccttgcctcctggctgtgtcagttgcaaacctgcaggaggtcaactaaaggtcaagaaggtcaactaaaggtcatcgaggtcaactaaaggtcagacaggtcaactaaaggtcactaaggtcaactaaaggtcaactaggtcaactaaaggtcatgcggcgcgccatgcttcatcagactct

SEQ ID NO: 9589 - DNA, 191 bp, Artificial Sequence; identical to SEQ ID NO: 9588
  Synthetic polynucleotide

SEQ ID NO: 9590 - DNA, 185 bp, Artificial Sequence
  Synthetic polynucleotide
atcatctcaccttgcctcctgctggttccaactcacgccctgcaggtctaatttgcatacaaagatctaatttgcatacaatcgtctaatttgcatacaagactctaatttgcatacaactatctaatttgcatacaaacttctaatttgcatacaatgcggcgcgccatgcttcatcagactct

SEQ ID NO: 9591 - DNA, 185 bp, Artificial Sequence; identical to SEQ ID NO: 9590
  Synthetic polynucleotide

SEQ ID NO: 9592 - DNA, 188 bp, Artificial Sequence
  Synthetic polynucleotide
atcatctcaccttgcctcctgattctgctgatgagtcacctgcaggtaaggaagaaggagataaggaagaaggtcgtaaggaagaagggactaaggaagaaggctataaggaagaaggacttaaggaagaaggtgctaaggaagaagggtataaggaagaaggggcgcgccatgcttcatcagactct

SEQ ID NO: 9593 - DNA, 188 bp, Artificial Sequence; identical to SEQ ID NO: 9592
  Synthetic polynucleotide

SEQ ID NO: 9594 - DNA, 196 bp, Artificial Sequence
  Synthetic polynucleotide
atcatctcaccttgcctcctgtgctagccacgcatgtacctgcaggccaccggaaattaagaccaccggaaattatcgccaccggaaattagacccaccggaaattactaccaccggaaattaactccaccggaaattatgcccaccggaaattagtaccaccggaaattaggcgcgccatgcttcatcagactct

SEQ ID NO: 9595 - DNA, 196 bp, Artificial Sequence; identical to SEQ ID NO: 9594
  Synthetic polynucleotide

SEQ ID NO: 9596 - DNA, 190 bp, Artificial Sequence
  Synthetic polynucleotide
atcatctcaccttgcctcctgagttagctatgcgatgccctgcaggaaccacaataccaaagaaaccacaataccaatcgaaccacaataccaagacaaccacaataccaactaaaccacaataccaaactaaccacaataccaatgcaaccacaataccaagtaggcgcgccatgcttcatcagactct

SEQ ID NO: 9597 - DNA, 190 bp, Artificial Sequence; identical to SEQ ID NO: 9596
  Synthetic polynucleotide

SEQ ID NO: 9598 - DNA, 188 bp, Artificial Sequence
  Synthetic polynucleotide
atcatctcaccttgcctcctgccatcattctgcttcttcctgcaggggggcaggtctgagaggggcaggtctgtcgggggcaggtctggacggggcaggtctgctaggggcaggtctgactggggcaggtctgtgcggggcaggtctggtaggggcaggtctgggcgcgccatgcttcatcagactct

SEQ ID NO: 9599 - DNA, 188 bp, Artificial Sequence; identical to SEQ ID NO: 9598
  Synthetic polynucleotide

SEQ ID NO: 9600 - DNA, 196 bp, Artificial Sequence
  Synthetic polynucleotide
atcatctcaccttgcctcctggaggtacggttcattaccctgcagggattacgtaacagagagattacgtaacagtcggattacgtaacaggacgattacgtaacagctagattacgtaacagactgattacgtaacagtgcgattacgtaacaggtagattacgtaacagggcgcgccatgcttcatcagactct

SEQ ID NO: 9601 - DNA, 196 bp, Artificial Sequence; identical to SEQ ID NO: 9600
  Synthetic polynucleotide

SEQ ID NO: 9602 - DNA, 190 bp, Artificial Sequence
  Synthetic polynucleotide
atcatctcaccttgcctcctgtggaactagtcactgtgcctgcaggttaccatggcaaccagattaccatggcaacctcgttaccatggcaaccgacttaccatggcaaccctattaccatggcaaccactttaccatggcaacctgcttaccatggcaaccgtaggcgcgccatgcttcatcagactct

SEQ ID NO: 9603 - DNA, 190 bp, Artificial Sequence; identical to SEQ ID NO: 9602
  Synthetic polynucleotide

SEQ ID NO: 9604 - DNA, 172 bp, Artificial Sequence
  Synthetic polynucleotide
atcatctcaccttgcctcctgagattaagccatgctcacctgcaggtgtctagacgagatgtctagacgtcgtgtctagacggactgtctagacgctatgtctagacgacttgtctagacgtgctgtctagacggtatgtctagacgggcgcgccatgcttcatcagactct

SEQ ID NO: 9605 - DNA, 172 bp, Artificial Sequence; identical to SEQ ID NO: 9604
  Synthetic polynucleotide

SEQ ID NO: 9606 - DNA, 188 bp, Artificial Sequence
  Synthetic polynucleotide
atcatctcaccttgcctcctgacgaatttccgaagcaacctgcaggaaacatatgtttagaaaacatatgttttcgaaacatatgtttgacaaacatatgtttctaaaacatatgtttactaaacatatgttttgcaaacatatgtttgtaaaacatatgtttggcgcgccatgcttcatcagactct

SEQ ID NO: 9607 - DNA, 188 bp, Artificial Sequence; identical to SEQ ID NO: 9606
  Synthetic polynucleotide

SEQ ID NO: 9608 - DNA, 164 bp, Artificial Sequence
  Synthetic polynucleotide
atcatctcaccttgcctcctgcagcaatcaaccgttcgcctgcaggtgataccctagatgatacccttcgtgataccctgactgataccctctatgataccctacttgatacccttgctgataccctgtatgataccctggcgcgccatgcttcatcagactct

SEQ ID NO: 9609 - DNA, 164 bp, Artificial Sequence; identical to SEQ ID NO: 9608
  Synthetic polynucleotide

SEQ ID NO: 9610 - DNA, 185 bp, Artificial Sequence
  Synthetic polynucleotide
atcatctcaccttgcctcctgctcttgcaagaacaccccctgcaggtcgaccccgcccctatagatcgaccccgcccctattcgtcgaccccgcccctatgactcgaccccgcccctatctatcgaccccgcccctatacttcgaccccgcccctattgcggcgcgccatgcttcatcagactct

SEQ ID NO: 9611 - DNA, 185 bp, Artificial Sequence; identical to SEQ ID NO: 9610
  Synthetic polynucleotide

SEQ ID NO: 9612 - DNA, 197 bp, Artificial Sequence
  Synthetic polynucleotide
atcatctcaccttgcctcctgactataagttggtccttcctgcaggggggacacctgccgtagaggggacacctgccgttcgggggacacctgccgtgacggggacacctgccgtctaggggacacctgccgtactggggacacctgccgttgcggggacacctgccgtgtaggcgcgccatgcttcatcagactct

SEQ ID NO: 9613 - DNA, 197 bp, Artificial Sequence; identical to SEQ ID NO: 9612
  Synthetic polynucleotide

SEQ ID NO: 9614 - DNA, 185 bp, Artificial Sequence
  Synthetic polynucleotide
atcatctcaccttgcctcctgacactattgagatcgaacctgcaggttcctagaaagcttttagattcctagaaagctttttcgttcctagaaagcttttgacttcctagaaagcttttctattcctagaaagcttttactttcctagaaagctttttgcggcgcgccatgcttcatcagactct

SEQ ID NO: 9615 - DNA, 185 bp, Artificial Sequence; identical to SEQ ID NO: 9614
  Synthetic polynucleotide

SEQ ID NO: 9616 - DNA, 156 bp, Artificial Sequence
  Synthetic polynucleotide
atcatctcaccttgcctcctgcatgccacctctttccgcctgcaggaattagtgagaaattagtgtcgaattagtggacaattagtgctaaattagtgactaattagtgtgcaattagtggtaaattagtgggcgcgccatgcttcatcagactct

SEQ ID NO: 9617 - DNA, 156 bp, Artificial Sequence; identical to SEQ ID NO: 9616
  Synthetic polynucleotide

SEQ ID NO: 9618 - DNA, 180 bp, Artificial Sequence
  Synthetic polynucleotide
atcatctcaccttgcctcctgagattgtagcggtcgagcctgcaggtttgtttacttagatttgtttactttcgtttgtttacttgactttgtttacttctatttgtttacttacttttgtttactttgctttgtttacttgtatttgtttacttggcgcgccatgcttcatcagactct

SEQ ID NO: 9619 - DNA, 180 bp, Artificial Sequence; identical to SEQ ID NO: 9618
  Synthetic polynucleotide

SEQ ID NO: 9620 - DNA, 185 bp, Artificial Sequence
  Synthetic polynucleotide
atcatctcaccttgcctcctgactgttgaacctgactgcctgcaggtaagtaattagttataagataagtaattagttatatcgtaagtaattagttatagactaagtaattagttatactataagtaattagttataacttaagtaattagttatatgcggcgcgccatgcttcatcagactct

SEQ ID NO: 9621 - DNA, 185 bp, Artificial Sequence; identical to SEQ ID NO: 9620
  Synthetic polynucleotide

SEQ ID NO: 9622 - DNA, 180 bp, Artificial Sequence
  Synthetic polynucleotide
atcatctcaccttgcctcctgattataagctcgaaccacctgcaggccctctggtggagaccctctggtggtcgccctctggtgggacccctctggtggctaccctctggtggactccctctggtggtgcccctctggtgggtaccctctggtggggcgcgccatgcttcatcagactct

SEQ ID NO: 9623 - DNA, 180 bp, Artificial Sequence; identical to SEQ ID NO: 9622
  Synthetic polynucleotide

SEQ ID NO: 9624 - DNA, 179 bp, Artificial Sequence
  Synthetic polynucleotide
atcatctcaccttgcctcctgctgtattcagcctccctcctgcaggggcatatgctgtgatttattttgtagaggcatatgctgtgatttattttgttcgggcatatgctgtgatttattttgtgacggcatatgctgtgatttattttgtctaggcgcgccatgcttcatcagactct

SEQ ID NO: 9625 - DNA, 179 bp, Artificial Sequence; identical to SEQ ID NO: 9624
  Synthetic polynucleotide

SEQ ID NO: 9626 - DNA, 188 bp, Artificial Sequence
  Synthetic polynucleotide
atcatctcaccttgcctcctgtcgtggtgagaagacatcctgcaggcagacctgccccagacagacctgcccctcgcagacctgccccgaccagacctgccccctacagacctgccccactcagacctgcccctgccagacctgccccgtacagacctgccccggcgcgccatgcttcatcagactct

SEQ ID NO: 9627 - DNA, 188 bp, Artificial Sequence; identical to SEQ ID NO: 9626
  Synthetic polynucleotide

SEQ ID NO: 9628 - DNA, 188 bp, Artificial Sequence
  Synthetic polynucleotide
atcatctcaccttgcctcctggcaaggaacacataccccctgcaggagttacgtcaccagaagttacgtcacctcgagttacgtcaccgacagttacgtcaccctaagttacgtcaccactagttacgtcacctgcagttacgtcaccgtaagttacgtcaccggcgcgccatgcttcatcagactct

SEQ ID NO: 9629 - DNA, 188 bp, Artificial Sequence; identical to SEQ ID NO: 9628
  Synthetic polynucleotide

SEQ ID NO: 9630 - DNA, 172 bp, Artificial Sequence
  Synthetic polynucleotide
atcatctcaccttgcctcctgatatattgggcaccgcgcctgcaggtctttgtttaagatctttgtttatcgtctttgtttagactctttgtttactatctttgtttaacttctttgtttatgctctttgtttagtatctttgtttaggcgcgccatgcttcatcagactct

SEQ ID NO: 9631 - DNA, 172 bp, Artificial Sequence; identical to SEQ ID NO: 9630
  Synthetic polynucleotide

SEQ ID NO: 9632 - DNA, 185 bp, Artificial Sequence
  Synthetic polynucleotide
atcatctcaccttgcctcctgcttatgtttagcctcaccctgcaggataaatcacagcactcagaataaatcacagcactctcgataaatcacagcactcgacataaatcacagcactcctaataaatcacagcactcactataaatcacagcactctgcggcgcgccatgcttcatcagactct

SEQ ID NO: 9633 - DNA, 185 bp, Artificial Sequence; identical to SEQ ID NO: 9632
  Synthetic polynucleotide

SEQ ID NO: 9634 - DNA, 164 bp, Artificial Sequence
  Synthetic polynucleotide
atcatctcaccttgcctcctggaaggaccgaatgataacctgcaggacggtagcaagaacggtagcatcgacggtagcagacacggtagcactaacggtagcaactacggtagcatgcacggtagcagtaacggtagcaggcgcgccatgcttcatcagactct

SEQ ID NO: 9635 - DNA, 164 bp, Artificial Sequence; identical to SEQ ID NO: 9634
  Synthetic polynucleotide

SEQ ID NO: 9636 - DNA, 188 bp, Artificial Sequence
  Synthetic polynucleotide
atcatctcaccttgcctcctgtttctaatataagccggcctgcaggtttggcgccattagatttggcgccatttcgtttggcgccattgactttggcgccattctatttggcgccattacttttggcgccatttgctttggcgccattgtatttggcgccattggcgcgccatgcttcatcagactct

SEQ ID NO: 9637 - DNA, 188 bp, Artificial Sequence; identical to SEQ ID NO: 9636
  Synthetic polynucleotide

SEQ ID NO: 9638 - DNA, 172 bp, Artificial Sequence
  Synthetic polynucleotide
atcatctcaccttgcctcctgacgtgcaggctagcattcctgcaggcataaataatagacataaataattcgcataaataatgaccataaataatctacataaataatactcataaataattgccataaataatgtacataaataatggcgcgccatgcttcatcagactct

SEQ ID NO: 9639 - DNA, 172 bp, Artificial Sequence; identical to SEQ ID NO: 9638
  Synthetic polynucleotide

SEQ ID NO: 9640 - DNA, 140 bp, Artificial Sequence
  Synthetic polynucleotide
atcatctcaccttgcctcctgaaagacaaatcacaggccctgcaggttgacaagattgacatcgttgacagacttgacactattgacaactttgacatgcttgacagtattgacaggcgcgccatgcttcatcagactct

SEQ ID NO: 9641 - DNA, 140 bp, Artificial Sequence; identical to SEQ ID NO: 9640
  Synthetic polynucleotide

SEQ ID NO: 9642 - DNA, 156 bp, Artificial Sequence
  Synthetic polynucleotide
atcatctcaccttgcctcctggggtttgttcgaggagccctgcagggcaggtgcagagcaggtgctcggcaggtgcgacgcaggtgcctagcaggtgcactgcaggtgctgcgcaggtgcgtagcaggtgcggcgcgccatgcttcatcagactct

SEQ ID NO: 9643 - DNA, 156 bp, Artificial Sequence; identical to SEQ ID NO: 9642
  Synthetic polynucleotide

SEQ ID NO: 9644 - DNA, 197 bp, Artificial Sequence
  Synthetic polynucleotide
atcatctcaccttgcctcctgctgtgacgtagtacgggcctgcaggctctgattggccggcagactctgattggccggctcgctctgattggccggcgacctctgattggccggcctactctgattggccggcactctctgattggccggctgcctctgattggccggcgtaggcgcgccatgcttcatcagactct

SEQ ID NO: 9645 - DNA, 197 bp, Artificial Sequence; identical to SEQ ID NO: 9644
  Synthetic polynucleotide

SEQ ID NO: 9646 - DNA, 191 bp, Artificial Sequence
  Synthetic polynucleotide
atcatctcaccttgcctcctgctagtgagagcagacaacctgcaggcatgaataccattcatcagacatgaataccattcatctcgcatgaataccattcatcgaccatgaataccattcatcctacatgaataccattcatcactcatgaataccattcatctgcggcgcgccatgcttcatcagactct

SEQ ID NO: 9647 - DNA, 191 bp, Artificial Sequence; identical to SEQ ID NO: 9646
  Synthetic polynucleotide

SEQ ID NO: 9648 - DNA, 191 bp, Artificial Sequence
  Synthetic polynucleotide
atcatctcaccttgcctcctgaattcgccgttctatagcctgcaggaaagtgaaagtgaaagtaaaaagaaaagtgaaagtgaaagtaaaatcgaaagtgaaagtgaaagtaaaagacaaagtgaaagtgaaagtaaaactaaaagtgaaagtgaaagtaaaaactggcgcgccatgcttcatcagactct

SEQ ID NO: 9649 - DNA, 191 bp, Artificial Sequence; identical to SEQ ID NO: 9648
  Synthetic polynucleotide

SEQ ID NO: 9650 - DNA, 180 bp, Artificial Sequence
  Synthetic polynucleotide
atcatctcaccttgcctcctgtcggtcatggtagcgtacctgcaggtgctgtgatttagatgctgtgattttcgtgctgtgatttgactgctgtgatttctatgctgtgatttacttgctgtgattttgctgctgtgatttgtatgctgtgatttggcgcgccatgcttcatcagactct

SEQ ID NO: 9651 - DNA, 180 bp, Artificial Sequence; identical to SEQ ID NO: 9650
  Synthetic polynucleotide

SEQ ID NO: 9652 - DNA, 191 bp, Artificial Sequence
  Synthetic polynucleotide
atcatctcaccttgcctcctgaaagagacaggtcaaatcctgcagggtctttgtttactttttagagtctttgtttacttttttcggtctttgtttactttttgacgtctttgtttactttttctagtctttgtttactttttactgtctttgtttacttttttgcggcgcgccatgcttcatcagactct

SEQ ID NO: 9653 - DNA, 191 bp, Artificial Sequence; identical to SEQ ID NO: 9652
  Synthetic polynucleotide

SEQ ID NO: 9654 - DNA, 156 bp, Artificial Sequence
  Synthetic polynucleotide
atcatctcaccttgcctcctgggcgtgaggtgtgacttcctgcagggcaggtggagagcaggtggtcggcaggtgggacgcaggtggctagcaggtggactgcaggtggtgcgcaggtgggtagcaggtggggcgcgccatgcttcatcagactct

SEQ ID NO: 9655 - DNA, 156 bp, Artificial Sequence; identical to SEQ ID NO: 9654
  Synthetic polynucleotide

SEQ ID NO: 9656 - DNA, 196 bp, Artificial Sequence
  Synthetic polynucleotide
atcatctcaccttgcctcctggcctaaccaattcaggacctgcaggaaaggcgcgaaaaagaaaaggcgcgaaaatcgaaaggcgcgaaaagacaaaggcgcgaaaactaaaaggcgcgaaaaactaaaggcgcgaaaatgcaaaggcgcgaaaagtaaaaggcgcgaaaaggcgcgccatgcttcatcagactct

SEQ ID NO: 9657 - DNA, 196 bp, Artificial Sequence; identical to SEQ ID NO: 9656
  Synthetic polynucleotide

SEQ ID NO: 9658 - DNA, 196 bp, Artificial Sequence
  Synthetic polynucleotide
atcatctcaccttgcctcctgacgtttatcccgcatgacctgcagggtgactcatcctcagagtgactcatcctctcggtgactcatcctcgacgtgactcatcctcctagtgactcatcctcactgtgactcatcctctgcgtgactcatcctcgtagtgactcatcctcggcgcgccatgcttcatcagactct

SEQ ID NO: 9659 - DNA, 196 bp, Artificial Sequence; identical to SEQ ID NO: 9658
  Synthetic polynucleotide

SEQ ID NO: 9660 - DNA, 180 bp, Artificial Sequence
  Synthetic polynucleotide
atcatctcaccttgcctcctgcccgataatacattggacctgcaggagagcacgtggagaagagcacgtggtcgagagcacgtgggacagagcacgtggctaagagcacgtggactagagcacgtggtgcagagcacgtgggtaagagcacgtggggcgcgccatgcttcatcagactct

SEQ ID NO: 9661 - DNA, 180 bp, Artificial Sequence; identical to SEQ ID NO: 9660
  Synthetic polynucleotide

SEQ ID NO: 9662 - DNA, 197 bp, Artificial Sequence
  Synthetic polynucleotide
atcatctcaccttgcctcctgtgtgacgaatcgtgacacctgcaggcggtttaaaaataacccaagacggtttaaaaataacccatcgcggtttaaaaataacccagaccggtttaaaaataacccactacggtttaaaaataacccaactcggtttaaaaataacccatgcggcgcgccatgcttcatcagactct

SEQ ID NO: 9663 - DNA, 197 bp, Artificial Sequence; identical to SEQ ID NO: 9662
  Synthetic polynucleotide

SEQ ID NO: 9664 - DNA, 185 bp, Artificial Sequence
  Synthetic polynucleotide
atcatctcaccttgcctcctgaaggaccagacacaagtcctgcaggccctccgcctgggggcagaccctccgcctgggggctcgccctccgcctgggggcgacccctccgcctgggggcctaccctccgcctgggggcactccctccgcctgggggctgcggcgcgccatgcttcatcagactct

SEQ ID NO: 9665 - DNA, 185 bp, Artificial Sequence; identical to SEQ ID NO: 9664
  Synthetic polynucleotide

SEQ ID NO: 9666 - DNA, 172 bp, Artificial Sequence
  Synthetic polynucleotide
atcatctcaccttgcctcctgatatgctttcgagggcgcctgcaggattggcgcgcagaattggcgcgctcgattggcgcgcgacattggcgcgcctaattggcgcgcactattggcgcgctgcattggcgcgcgtaattggcgcgcggcgcgccatgcttcatcagactct

SEQ ID NO: 9667 - DNA, 172 bp, Artificial Sequence; identical to SEQ ID NO: 9666
  Synthetic polynucleotide

SEQ ID NO: 9668 - DNA, 172 bp, Artificial Sequence
  Synthetic polynucleotide
atcatctcaccttgcctcctgaggtatattcaagctggcctgcagggccaattagcagagccaattagctcggccaattagcgacgccaattagcctagccaattagcactgccaattagctgcgccaattagcgtagccaattagcggcgcgccatgcttcatcagactct

SEQ ID NO: 9669 - DNA, 172 bp, Artificial Sequence; identical to SEQ ID NO: 9668
  Synthetic polynucleotide

SEQ ID NO: 9670 - DNA, 198 bp, Artificial Sequence
  Synthetic polynucleotide
atcatctcaccttgcctcctggagttgactcgcatctccctgcaggttatgattatgcaaattaaaagaagattatgattatgcaaattaaaagatcgttatgattatgcaaattaaaagagacttatgattatgcaaattaaaagactattatgattatgcaaattaaaagaggcgcgccatgcttcatcagactct

SEQ ID NO: 9671 - DNA, 198 bp, Artificial Sequence; identical to SEQ ID NO: 9670
  Synthetic polynucleotide

SEQ ID NO: 9672 - DNA, 190 bp, Artificial Sequence
  Synthetic polynucleotide
atcatctcaccttgcctcctgaagtacagatcgtagagcctgcaggggtagggaaaccccagaggtagggaaacccctcgggtagggaaaccccgacggtagggaaaccccctaggtagggaaaccccactggtagggaaacccctgcggtagggaaaccccgtaggcgcgccatgcttcatcagactct

SEQ ID NO: 9673 - DNA, 190 bp, Artificial Sequence; identical to SEQ ID NO: 9672
  Synthetic polynucleotide

SEQ ID NO: 9674 - DNA, 172 bp, Artificial Sequence
  Synthetic polynucleotide
atcatctcaccttgcctcctgacccttgttcagaagtccctgcaggcacgtggcccagacacgtggccctcgcacgtggcccgaccacgtggcccctacacgtggcccactcacgtggccctgccacgtggcccgtacacgtggcccggcgcgccatgcttcatcagactct

SEQ ID NO: 9675 - DNA, 172 bp, Artificial Sequence; identical to SEQ ID NO: 9674
  Synthetic polynucleotide

SEQ ID NO: 9676 - DNA, 156 bp, Artificial Sequence
  Synthetic polynucleotide
atcatctcaccttgcctcctggcctattactgattgctcctgcaggagtggggaagaagtggggatcgagtggggagacagtggggactaagtggggaactagtggggatgcagtggggagtaagtggggaggcgcgccatgcttcatcagactct

SEQ ID NO: 9677 - DNA, 156 bp, Artificial Sequence; identical to SEQ ID NO: 9676
  Synthetic polynucleotide

SEQ ID NO: 9678 - DNA, 180 bp, Artificial Sequence
  Synthetic polynucleotide
atcatctcaccttgcctcctgagtgtcgcatgcttcgacctgcaggcacttccggcgagacacttccggcgtcgcacttccggcggaccacttccggcgctacacttccggcgactcacttccggcgtgccacttccggcggtacacttccggcgggcgcgccatgcttcatcagactct

SEQ ID NO: 9679 - DNA, 180 bp, Artificial Sequence; identical to SEQ ID NO: 9678
  Synthetic polynucleotide

SEQ ID NO: 9680 - DNA, 172 bp, Artificial Sequence
  Synthetic polynucleotide
atcatctcaccttgcctcctgttgagaggactcgctggcctgcaggccgtaccaccagaccgtaccacctcgccgtaccaccgacccgtaccaccctaccgtaccaccactccgtaccacctgcccgtaccaccgtaccgtaccaccggcgcgccatgcttcatcagactct

SEQ ID NO: 9681 - DNA, 172 bp, Artificial Sequence; identical to SEQ ID NO: 9680
  Synthetic polynucleotide

SEQ ID NO: 9682 - DNA, 156 bp, Artificial Sequence
  Synthetic polynucleotide
atcatctcaccttgcctcctgagagttccttgcggtcccctgcagggcaggtgtagagcaggtgttcggcaggtgtgacgcaggtgtctagcaggtgtactgcaggtgttgcgcaggtgtgtagcaggtgtggcgcgccatgcttcatcagactct

SEQ ID NO: 9683 - DNA, 156 bp, Artificial Sequence; identical to SEQ ID NO: 9682
  Synthetic polynucleotide

SEQ ID NO: 9684 - DNA, 172 bp, Artificial Sequence
  Synthetic polynucleotide
atcatctcaccttgcctcctgtgcaaatgacgaggcgacctgcaggatgataccccagaatgatacccctcgatgataccccgacatgataccccctaatgataccccactatgatacccctgcatgataccccgtaatgataccccggcgcgccatgcttcatcagactct

SEQ ID NO: 9685 - DNA, 172 bp, Artificial Sequence; identical to SEQ ID NO: 9684
  Synthetic polynucleotide

SEQ ID NO: 9686 - DNA, 196 bp, Artificial Sequence
  Synthetic polynucleotide
atcatctcaccttgcctcctgagactgataccatcaaccctgcaggaataaagaacaatagaatttcaagaaataaagaacaatagaatttcatcgaataaagaacaatagaatttcagacaataaagaacaatagaatttcactaaataaagaacaatagaatttcaactggcgcgccatgcttcatcagactct

SEQ ID NO: 9687 - DNA, 196 bp, Artificial Sequence; identical to SEQ ID NO: 9686
  Synthetic polynucleotide

SEQ ID NO: 9688 - DNA, 180 bp, Artificial Sequence
  Synthetic polynucleotide
atcatctcaccttgcctcctgtatttctacgcaagatccctgcaggcacttccggccagacacttccggcctcgcacttccggccgaccacttccggccctacacttccggccactcacttccggcctgccacttccggccgtacacttccggccggcgcgccatgcttcatcagactct

SEQ ID NO: 9689 - DNA, 180 bp, Artificial Sequence; identical to SEQ ID NO: 9688
  Synthetic polynucleotide

SEQ ID NO: 9690 - DNA, 190 bp, Artificial Sequence
  Synthetic polynucleotide
atcatctcaccttgcctcctgaagacgcccttcagaatcctgcaggtgacagttttatggagatgacagttttatggtcgtgacagttttatgggactgacagttttatggctatgacagttttatggacttgacagttttatggtgctgacagttttatgggtaggcgcgccatgcttcatcagactct

SEQ ID NO: 9691 - DNA, 190 bp, Artificial Sequence; identical to SEQ ID NO: 9690
  Synthetic polynucleotide

SEQ ID NO: 9692 - DNA, 190 bp, Artificial Sequence
  Synthetic polynucleotide
atcatctcaccttgcctcctgaagtgcttgccatagcgcctgcagggaccccccgcgaagagagaccccccgcgaagtcggaccccccgcgaaggacgaccccccgcgaagctagaccccccgcgaagactgaccccccgcgaagtgcgaccccccgcgaaggtaggcgcgccatgcttcatcagactct

SEQ ID NO: 9693 - DNA, 190 bp, Artificial Sequence; identical to SEQ ID NO: 9692
  Synthetic polynucleotide

SEQ ID NO: 9694 - DNA, 191 bp, Artificial Sequence
  Synthetic polynucleotide
atcatctcaccttgcctcctggcagcgcaatactgttacctgcaggttttaagtacttaaattagattttaagtacttaaatttcgttttaagtacttaaattgacttttaagtacttaaattctattttaagtacttaaattactttttaagtacttaaatttgcggcgcgccatgcttcatcagactct

SEQ ID NO: 9695 - DNA, 191 bp, Artificial Sequence; identical to SEQ ID NO: 9694
  Synthetic polynucleotide

SEQ ID NO: 9696 - DNA, 196 bp, Artificial Sequence
  Synthetic polynucleotide
atcatctcaccttgcctcctgcaatgttgtgttcgctccctgcaggaatatgcgggtttagaaatatgcgggttttcgaatatgcgggtttgacaatatgcgggtttctaaatatgcgggtttactaatatgcgggttttgcaatatgcgggtttgtaaatatgcgggtttggcgcgccatgcttcatcagactct

SEQ ID NO: 9697 - DNA, 196 bp, Artificial Sequence; identical to SEQ ID NO: 9696
  Synthetic polynucleotide

SEQ ID NO: 9698 - DNA, 156 bp, Artificial Sequence
  Synthetic polynucleotide
atcatctcaccttgcctcctgcagagccttgtctaggccctgcaggaaaaacaaagaaaaaacaatcgaaaaacaagacaaaaacaactaaaaaacaaactaaaaacaatgcaaaaacaagtaaaaaacaaggcgcgccatgcttcatcagactct

SEQ ID NO: 9699 - DNA, 156 bp, Artificial Sequence; identical to SEQ ID NO: 9698
  Synthetic polynucleotide

SEQ ID NO: 9700 - DNA, 196 bp, Artificial Sequence
  Synthetic polynucleotide
atcatctcaccttgcctcctgctgctgagataagatggcctgcaggcagctcattaataagacagctcattaatatcgcagctcattaatagaccagctcattaatactacagctcattaataactcagctcattaatatgccagctcattaatagtacagctcattaataggcgcgccatgcttcatcagactct

SEQ ID NO: 9701 - DNA, 196 bp, Artificial Sequence; identical to SEQ ID NO: 9700
  Synthetic polynucleotide

SEQ ID NO: 9702 - DNA, 164 bp, Artificial Sequence
  Synthetic polynucleotide
atcatctcaccttgcctcctgatgtgtcctgaatccttcctgcaggattacatcaagaattacatcatcgattacatcagacattacatcactaattacatcaactattacatcatgcattacatcagtaattacatcaggcgcgccatgcttcatcagactct

SEQ ID NO: 9703 - DNA, 164 bp, Artificial Sequence; identical to SEQ ID NO: 9702
  Synthetic polynucleotide

SEQ ID NO: 9704 - DNA, 164 bp, Artificial Sequence
  Synthetic polynucleotide
atcatctcaccttgcctcctgaatggaggtatagcgcgcctgcagggctaatcccagagctaatccctcggctaatcccgacgctaatcccctagctaatcccactgctaatccctgcgctaatcccgtagctaatcccggcgcgccatgcttcatcagactct

SEQ ID NO: 9705 - DNA, 164 bp, Artificial Sequence; identical to SEQ ID NO: 9704
  Synthetic polynucleotide

SEQ ID NO: 9706 - DNA, 180 bp, Artificial Sequence
  Synthetic polynucleotide
atcatctcaccttgcctcctgcacctacattccaattacctgcaggttatccctataagattatccctatatcgttatccctatagacttatccctatactattatccctataactttatccctatatgcttatccctatagtattatccctataggcgcgccatgcttcatcagactct

SEQ ID NO: 9707 - DNA, 180 bp, Artificial Sequence; identical to SEQ ID NO: 9706
  Synthetic polynucleotide

SEQ ID NO: 9708 - DNA, 190 bp, Artificial Sequence
  Synthetic polynucleotide
atcatctcaccttgcctcctgatccgaataagtcgcatcctgcaggtgacagttttatgaagatgacagttttatgatcgtgacagttttatgagactgacagttttatgactatgacagttttatgaacttgacagttttatgatgctgacagttttatgagtaggcgcgccatgcttcatcagactct

SEQ ID NO: 9709 - DNA, 190 bp, Artificial Sequence; identical to SEQ ID NO: 9708
  Synthetic polynucleotide

SEQ ID NO: 9710 - DNA, 197 bp, Artificial Sequence
  Synthetic polynucleotide
atcatctcaccttgcctcctggattgatggttgcgtaacctgcagggagaaactgaaactgagagagaaactgaaactgtcggagaaactgaaactggacgagaaactgaaactgctagagaaactgaaactgactgagaaactgaaactgtgcgagaaactgaaactggtaggcgcgccatgcttcatcagactct

SEQ ID NO: 9711 - DNA, 197 bp, Artificial Sequence; identical to SEQ ID NO: 9710
  Synthetic polynucleotide

SEQ ID NO: 9712 - DNA, 196 bp, Artificial Sequence
  Synthetic polynucleotide
atcatctcaccttgcctcctgctagcttatatcacctgcctgcaggggtattcccagtaagaggtattcccagtatcgggtattcccagtagacggtattcccagtactaggtattcccagtaactggtattcccagtatgcggtattcccagtagtaggtattcccagtaggcgcgccatgcttcatcagactct

SEQ ID NO: 9713 - DNA, 196 bp, Artificial Sequence; identical to SEQ ID NO: 9712
  Synthetic polynucleotide

SEQ ID NO: 9714 - DNA, 188 bp, Artificial Sequence
  Synthetic polynucleotide
atcatctcaccttgcctcctgacccactgatacgagctcctgcaggtgcccgggggcaagatgcccgggggcatcgtgcccgggggcagactgcccgggggcactatgcccgggggcaacttgcccgggggcatgctgcccgggggcagtatgcccgggggcaggcgcgccatgcttcatcagactct

SEQ ID NO: 9715 - DNA, 188 bp, Artificial Sequence; identical to SEQ ID NO: 9714
  Synthetic polynucleotide

SEQ ID NO: 9716 - DNA, 190 bp, Artificial Sequence
  Synthetic polynucleotide
atcatctcaccttgcctcctgtcaacgccgcaacaaggcctgcaggataatttgcatattagaataatttgcatatttcgataatttgcatattgacataatttgcatattctaataatttgcatattactataatttgcatatttgcataatttgcatattgtaggcgcgccatgcttcatcagactct

SEQ ID NO: 9717 - DNA, 190 bp, Artificial Sequence; identical to SEQ ID NO: 9716
  Synthetic polynucleotide

SEQ ID NO: 9718 - DNA, 164 bp, Artificial Sequence
  Synthetic polynucleotide
atcatctcaccttgcctcctgttgtgtgaggtgatagacctgcaggcaggtgaggagacaggtgaggtcgcaggtgagggaccaggtgaggctacaggtgaggactcaggtgaggtgccaggtgagggtacaggtgaggggcgcgccatgcttcatcagactct

SEQ ID NO: 9719 - DNA, 164 bp, Artificial Sequence; identical to SEQ ID NO: 9718
  Synthetic polynucleotide

SEQ ID NO: 9720 - DNA, 164 bp, Artificial Sequence
  Synthetic polynucleotide
atcatctcaccttgcctcctgtcatgatgggcagccgacctgcaggttacgcaaaagattacgcaaatcgttacgcaaagacttacgcaaactattacgcaaaactttacgcaaatgcttacgcaaagtattacgcaaaggcgcgccatgcttcatcagactct

SEQ ID NO: 9721 - DNA, 164 bp, Artificial Sequence; identical to SEQ ID NO: 9720
  Synthetic polynucleotide

SEQ ID NO: 9722 - DNA, 164 bp, Artificial Sequence
  Synthetic polynucleotide
atcatctcaccttgcctcctgaaatacatgccaacgttcctgcaggtgcgtgcggagatgcgtgcggtcgtgcgtgcgggactgcgtgcggctatgcgtgcggacttgcgtgcggtgctgcgtgcgggtatgcgtgcggggcgcgccatgcttcatcagactct

SEQ ID NO: 9723 - DNA, 164 bp, Artificial Sequence; identical to SEQ ID NO: 9722
  Synthetic polynucleotide

SEQ ID NO: 9724 - DNA, 148 bp, Artificial Sequence
  Synthetic polynucleotide
atcatctcaccttgcctcctgatgtctcaccttagacccctgcaggcacgtggagacacgtggtcgcacgtgggaccacgtggctacacgtggactcacgtggtgccacgtgggtacacgtggggcgcgccatgcttcatcagactct

SEQ ID NO: 9725 - DNA, 148 bp, Artificial Sequence; identical to SEQ ID NO: 9724
  Synthetic polynucleotide

SEQ ID NO: 9726 - DNA, 156 bp, Artificial Sequence
  Synthetic polynucleotide
atcatctcaccttgcctcctgaaattgcgtcatggtcccctgcaggcgtgacctagacgtgaccttcgcgtgacctgaccgtgacctctacgtgacctactcgtgaccttgccgtgacctgtacgtgacctggcgcgccatgcttcatcagactct

SEQ ID NO: 9727 - DNA, 156 bp, Artificial Sequence; identical to SEQ ID NO: 9726
  Synthetic polynucleotide

SEQ ID NO: 9728 - DNA, 191 bp, Artificial Sequence
  Synthetic polynucleotide
atcatctcaccttgcctcctggttagaccggaagttgccctgcaggggacagctgttcagtttcctgagaggacagctgttcagtttcctgtcgggacagctgttcagtttcctggacggacagctgttcagtttcctgctaggacagctgttcagtttcctgactggcgcgccatgcttcatcagactct

SEQ ID NO: 9729 - DNA, 191 bp, Artificial Sequence; identical to SEQ ID NO: 9728
  Synthetic polynucleotide

SEQ ID NO: 9730 - DNA, 188 bp, Artificial Sequence
  Synthetic polynucleotide
atcatctcaccttgcctcctgtcgtaagtccggtcctccctgcagggattgtttgtttagagattgtttgttttcggattgtttgtttgacgattgtttgtttctagattgtttgtttactgattgtttgttttgcgattgtttgtttgtagattgtttgtttggcgcgccatgcttcatcagactct

SEQ ID NO: 9731 - DNA, 188 bp, Artificial Sequence; identical to SEQ ID NO: 9730
  Synthetic polynucleotide

SEQ ID NO: 9732 - DNA, 172 bp, Artificial Sequence
  Synthetic polynucleotide
atcatctcaccttgcctcctgacgttcgggagtttaaccctgcaggaatttaaattagaaatttaaatttcgaatttaaattgacaatttaaattctaaatttaaattactaatttaaatttgcaatttaaattgtaaatttaaattggcgcgccatgcttcatcagactct

SEQ ID NO: 9733 - DNA, 172 bp, Artificial Sequence; identical to SEQ ID NO: 9732
  Synthetic polynucleotide

SEQ ID NO: 9734 - DNA, 148 bp, Artificial Sequence
  Synthetic polynucleotide
atcatctcaccttgcctcctgattccgtcggtctacatcctgcaggcacgtgcagacacgtgctcgcacgtgcgaccacgtgcctacacgtgcactcacgtgctgccacgtgcgtacacgtgcggcgcgccatgcttcatcagactct

SEQ ID NO: 9735 - DNA, 148 bp, Artificial Sequence; identical to SEQ ID NO: 9734
  Synthetic polynucleotide

SEQ ID NO: 9736 - DNA, 148 bp, Artificial Sequence
  Synthetic polynucleotide
atcatctcaccttgcctcctgttgagggtgggtaactacctgcaggcacgtgaagacacgtgatcgcacgtgagaccacgtgactacacgtgaactcacgtgatgccacgtgagtacacgtgaggcgcgccatgcttcatcagactct

SEQ ID NO: 9737 - DNA, 148 bp, Artificial Sequence; identical to SEQ ID NO: 9736
  Synthetic polynucleotide

SEQ ID NO: 9738 - DNA, 180 bp, Artificial Sequence
  Synthetic polynucleotide
atcatctcaccttgcctcctgtggaggatcggacttggcctgcaggtgcctgaggcgagatgcctgaggcgtcgtgcctgaggcggactgcctgaggcgctatgcctgaggcgacttgcctgaggcgtgctgcctgaggcggtatgcctgaggcgggcgcgccatgcttcatcagactct

SEQ ID NO: 9739 - DNA, 180 bp, Artificial Sequence; identical to SEQ ID NO: 9738
  Synthetic polynucleotide

SEQ ID NO: 9740 - DNA, 164 bp, Artificial Sequence
  Synthetic polynucleotide
atcatctcaccttgcctcctgtctccatccagcaatgccctgcaggaaacaaattagaaaacaaatttcgaaacaaattgacaaacaaattctaaaacaaattactaaacaaatttgcaaacaaattgtaaaacaaattggcgcgccatgcttcatcagactct

SEQ ID NO: 9741 - DNA, 164 bp, Artificial Sequence; identical to SEQ ID NO: 9740
  Synthetic polynucleotide

SEQ ID NO: 9742 - DNA, 172 bp, Artificial Sequence
  Synthetic polynucleotide
atcatctcaccttgcctcctgaaatgttggcctacaaacctgcaggatggaatgtgagaatggaatgtgtcgatggaatgtggacatggaatgtgctaatggaatgtgactatggaatgtgtgcatggaatgtggtaatggaatgtgggcgcgccatgcttcatcagactct

SEQ ID NO: 9743 - DNA, 172 bp, Artificial Sequence; identical to SEQ ID NO: 9742
  Synthetic polynucleotide

SEQ ID NO: 9744 - DNA, 172 bp, Artificial Sequence
  Synthetic polynucleotide
atcatctcaccttgcctcctgtgaaggccatagttgtacctgcagggggcaatagaagagggcaatagatcggggcaatagagacgggcaatagactagggcaatagaactgggcaatagatgcgggcaatagagtagggcaatagaggcgcgccatgcttcatcagactct

SEQ ID NO: 9745 - DNA, 172 bp, Artificial Sequence; identical to SEQ ID NO: 9744
  Synthetic polynucleotide

SEQ ID NO: 9746 - DNA, 172 bp, Artificial Sequence
  Synthetic polynucleotide
atcatctcaccttgcctcctgtggttagctgagagtggcctgcaggtgtttatttaagatgtttatttatcgtgtttatttagactgtttatttactatgtttatttaacttgtttatttatgctgtttatttagtatgtttatttaggcgcgccatgcttcatcagactct

SEQ ID NO: 9747 - DNA, 172 bp, Artificial Sequence; identical to SEQ ID NO: 9746
  Synthetic polynucleotide

SEQ ID NO: 9748 - DNA, 185 bp, Artificial Sequence
  Synthetic polynucleotide
atcatctcaccttgcctcctgtgggacctaatagcaatcctgcaggactcctaattagtcgtagaactcctaattagtcgttcgactcctaattagtcgtgacactcctaattagtcgtctaactcctaattagtcgtactactcctaattagtcgttgcggcgcgccatgcttcatcagactct

SEQ ID NO: 9749 - DNA, 185 bp, Artificial Sequence; identical to SEQ ID NO: 9748
  Synthetic polynucleotide

SEQ ID NO: 9750 - DNA, 191 bp, Artificial Sequence
  Synthetic polynucleotide
atcatctcaccttgcctcctgctcttgtcaggtgtgtacctgcaggcagatgtgcacatacgtagacagatgtgcacatacgttcgcagatgtgcacatacgtgaccagatgtgcacatacgtctacagatgtgcacatacgtactcagatgtgcacatacgttgcggcgcgccatgcttcatcagactct

SEQ ID NO: 9751 - DNA, 191 bp, Artificial Sequence; identical to SEQ ID NO: 9750
  Synthetic polynucleotide

SEQ ID NO: 9752 - DNA, 185 bp, Artificial Sequence
  Synthetic polynucleotide
atcatctcaccttgcctcctgtgctactggaggagggtcctgcaggggtgtgaattcacaccagaggtgtgaattcacacctcgggtgtgaattcacaccgacggtgtgaattcacaccctaggtgtgaattcacaccactggtgtgaattcacacctgcggcgcgccatgcttcatcagactct

SEQ ID NO: 9753 - DNA, 185 bp, Artificial Sequence; identical to SEQ ID NO: 9752
  Synthetic polynucleotide

SEQ ID NO: 9754 - DNA, 164 bp, Artificial Sequence
  Synthetic polynucleotide
atcatctcaccttgcctcctgtccaggccataatgtctcctgcaggttacgcaatagattacgcaattcgttacgcaatgacttacgcaatctattacgcaatactttacgcaattgcttacgcaatgtattacgcaatggcgcgccatgcttcatcagactct

SEQ ID NO: 9755 - DNA, 164 bp, Artificial Sequence; identical to SEQ ID NO: 9754
  Synthetic polynucleotide

SEQ ID NO: 9756 - DNA, 172 bp, Artificial Sequence
  Synthetic polynucleotide
atcatctcaccttgcctcctgtcggttaacccaaccaacctgcaggggccgcggggagaggccgcggggtcgggccgcgggggacggccgcggggctaggccgcggggactggccgcggggtgcggccgcgggggtaggccgcggggggcgcgccatgcttcatcagactct

SEQ ID NO: 9757 - DNA, 172 bp, Artificial Sequence; identical to SEQ ID NO: 9756
  Synthetic polynucleotide

SEQ ID NO: 9758 - DNA, 172 bp, Artificial Sequence
  Synthetic polynucleotide
atcatctcaccttgcctcctgtaaagccgaagcctccgcctgcaggtgatggatggagatgatggatggtcgtgatggatgggactgatggatggctatgatggatggacttgatggatggtgctgatggatgggtatgatggatggggcgcgccatgcttcatcagactct

SEQ ID NO: 9759 - DNA, 172 bp, Artificial Sequence; identical to SEQ ID NO: 9758
  Synthetic polynucleotide

SEQ ID NO: 9760 - DNA, 164 bp, Artificial Sequence
  Synthetic polynucleotide
atcatctcaccttgcctcctgtcagaaggatcacgaatcctgcagggctaattggagagctaattggtcggctaattgggacgctaattggctagctaattggactgctaattggtgcgctaattgggtagctaattggggcgcgccatgcttcatcagactct

SEQ ID NO: 9761 - DNA, 164 bp, Artificial Sequence; identical to SEQ ID NO: 9760
  Synthetic polynucleotide

SEQ ID NO: 9762 - DNA, 196 bp, Artificial Sequence
  Synthetic polynucleotide
atcatctcaccttgcctcctgagatgggatagcccgcacctgcaggtcaataacattgaagatcaataacattgatcgtcaataacattgagactcaataacattgactatcaataacattgaacttcaataacattgatgctcaataacattgagtatcaataacattgaggcgcgccatgcttcatcagactct

SEQ ID NO: 9763 - DNA, 196 bp, Artificial Sequence; identical to SEQ ID NO: 9762
  Synthetic polynucleotide

SEQ ID NO: 9764 - DNA, 188 bp, Artificial Sequence
  Synthetic polynucleotide
atcatctcaccttgcctcctgccggagtactgaatactcctgcaggctgcgcatgcgcagactgcgcatgcgctcgctgcgcatgcgcgacctgcgcatgcgcctactgcgcatgcgcactctgcgcatgcgctgcctgcgcatgcgcgtactgcgcatgcgcggcgcgccatgcttcatcagactct

SEQ ID NO: 9765 - DNA, 188 bp, Artificial Sequence; identical to SEQ ID NO: 9764
  Synthetic polynucleotide

SEQ ID NO: 9766 - DNA, 172 bp, Artificial Sequence
  Synthetic polynucleotide
atcatctcaccttgcctcctgagtcacgccaagaaggtcctgcaggggcacgtgtcagaggcacgtgtctcgggcacgtgtcgacggcacgtgtcctaggcacgtgtcactggcacgtgtctgcggcacgtgtcgtaggcacgtgtcggcgcgccatgcttcatcagactct

SEQ ID NO: 9767 - DNA, 172 bp, Artificial Sequence; identical to SEQ ID NO: 9766
  Synthetic polynucleotide

SEQ ID NO: 9768 - DNA, 185 bp, Artificial Sequence
  Synthetic polynucleotide
atcatctcaccttgcctcctgtagcaatgcgcctcctccctgcaggctgaggtaattacctcagactgaggtaattacctctcgctgaggtaattacctcgacctgaggtaattacctcctactgaggtaattacctcactctgaggtaattacctctgcggcgcgccatgcttcatcagactct

SEQ ID NO: 9769 - DNA, 185 bp, Artificial Sequence; identical to SEQ ID NO: 9768
  Synthetic polynucleotide

SEQ ID NO: 9770 - DNA, 164 bp, Artificial Sequence
  Synthetic polynucleotide
atcatctcaccttgcctcctggcgtagcaaattatcgacctgcaggagatggccgagaagatggccgtcgagatggccggacagatggccgctaagatggccgactagatggccgtgcagatggccggtaagatggccgggcgcgccatgcttcatcagactct

SEQ ID NO: 9771 - DNA, 164 bp, Artificial Sequence; identical to SEQ ID NO: 9770
  Synthetic polynucleotide

SEQ ID NO: 9772 - DNA, 172 bp, Artificial Sequence
  Synthetic polynucleotide
atcatctcaccttgcctcctgaactccgtctatggccccctgcagggccatatgttagagccatatgtttcggccatatgttgacgccatatgttctagccatatgttactgccatatgtttgcgccatatgttgtagccatatgttggcgcgccatgcttcatcagactct

SEQ ID NO: 9773 - DNA, 172 bp, Artificial Sequence; identical to SEQ ID NO: 9772
  Synthetic polynucleotide

SEQ ID NO: 9774 - DNA, 185 bp, Artificial Sequence
  Synthetic polynucleotide
atcatctcaccttgcctcctgagagggtagggttgcagcctgcaggctgaggtaattacctgagactgaggtaattacctgtcgctgaggtaattacctggacctgaggtaattacctgctactgaggtaattacctgactctgaggtaattacctgtgcggcgcgccatgcttcatcagactct

SEQ ID NO: 9775 - DNA, 185 bp, Artificial Sequence; identical to SEQ ID NO: 9774
  Synthetic polynucleotide

SEQ ID NO: 9776 - DNA, 172 bp, Artificial Sequence
  Synthetic polynucleotide
atcatctcaccttgcctcctgtttactcatgcatttgccctgcagggtcagcaattagagtcagcaatttcggtcagcaattgacgtcagcaattctagtcagcaattactgtcagcaatttgcgtcagcaattgtagtcagcaattggcgcgccatgcttcatcagactct

SEQ ID NO: 9777 - DNA, 172 bp, Artificial Sequence; identical to SEQ ID NO: 9776
  Synthetic polynucleotide

SEQ ID NO: 9778 - DNA, 188 bp, Artificial Sequence
  Synthetic polynucleotide
atcatctcaccttgcctcctgctacacccatcgtcgaccctgcaggtggggatttcccagatggggatttccctcgtggggatttcccgactggggatttcccctatggggatttcccacttggggatttccctgctggggatttcccgtatggggatttcccggcgcgccatgcttcatcagactct

SEQ ID NO: 9779 - DNA, 188 bp, Artificial Sequence; identical to SEQ ID NO: 9778
  Synthetic polynucleotide

SEQ ID NO: 9780 - DNA, 191 bp, Artificial Sequence
  Synthetic polynucleotide
atcatctcaccttgcctcctgagggttactagcacacgcctgcaggaaaatgctgagtcagcattttagaaaaatgctgagtcagcatttttcgaaaatgctgagtcagcattttgacaaaatgctgagtcagcattttctaaaaatgctgagtcagcattttactggcgcgccatgcttcatcagactct

SEQ ID NO: 9781 - DNA, 191 bp, Artificial Sequence; identical to SEQ ID NO: 9780
  Synthetic polynucleotide

SEQ ID NO: 9782 - DNA, 156 bp, Artificial Sequence
  Synthetic polynucleotide
atcatctcaccttgcctcctgaattatcaaccctcggacctgcaggaccgcttcagaaccgcttctcgaccgcttcgacaccgcttcctaaccgcttcactaccgcttctgcaccgcttcgtaaccgcttcggcgcgccatgcttcatcagactct

SEQ ID NO: 9783 - DNA, 156 bp, Artificial Sequence; identical to SEQ ID NO: 9782
  Synthetic polynucleotide

SEQ ID NO: 9784 - DNA, 199 bp, Artificial Sequence
  Synthetic polynucleotide
atcatctcaccttgcctcctgccgggatacgcgatatacctgcaggttgtattgaagctaaagtttgatctgttcagattgtattgaagctaaagtttgatctgttctcgttgtattgaagctaaagtttgatctgttcgacttgtattgaagctaaagtttgatctgttcctaggcgcgccatgcttcatcagactct

SEQ ID NO: 9785 - DNA, 199 bp, Artificial Sequence; identical to SEQ ID NO: 9784
  Synthetic polynucleotide

SEQ ID NO: 9786 - DNA, 188 bp, Artificial Sequence
  Synthetic polynucleotide
atcatctcaccttgcctcctgaggacaagaaatgcgagcctgcagggcgaccaccgaaagagcgaccaccgaatcggcgaccaccgaagacgcgaccaccgaactagcgaccaccgaaactgcgaccaccgaatgcgcgaccaccgaagtagcgaccaccgaaggcgcgccatgcttcatcagactct

SEQ ID NO: 9787 - DNA, 188 bp, Artificial Sequence; identical to SEQ ID NO: 9786
  Synthetic polynucleotide

SEQ ID NO: 9788 - DNA, 190 bp, Artificial Sequence
  Synthetic polynucleotide
atcatctcaccttgcctcctggagtcgaaacgactccgcctgcaggaatgcgtgggcgtaagaaatgcgtgggcgtatcgaatgcgtgggcgtagacaatgcgtgggcgtactaaatgcgtgggcgtaactaatgcgtgggcgtatgcaatgcgtgggcgtagtaggcgcgccatgcttcatcagactct

SEQ ID NO: 9789 - DNA, 190 bp, Artificial Sequence; identical to SEQ ID NO: 9788
  Synthetic polynucleotide

SEQ ID NO: 9790 - DNA, 172 bp, Artificial Sequence
  Synthetic polynucleotide
atcatctcaccttgcctcctgcactcagaagaagtattcctgcaggcatccatcaaagacatccatcaatcgcatccatcaagaccatccatcaactacatccatcaaactcatccatcaatgccatccatcaagtacatccatcaaggcgcgccatgcttcatcagactct

SEQ ID NO: 9791 - DNA, 172 bp, Artificial Sequence; identical to SEQ ID NO: 9790
  Synthetic polynucleotide

SEQ ID NO: 9792 - DNA, 172 bp, Artificial Sequence
  Synthetic polynucleotide
atcatctcaccttgcctcctgtggagttatccgtcgcccctgcaggcttcctggaaagacttcctggaatcgcttcctggaagaccttcctggaactacttcctggaaactcttcctggaatgccttcctggaagtacttcctggaaggcgcgccatgcttcatcagactct

SEQ ID NO: 9793 - DNA, 172 bp, Artificial Sequence; identical to SEQ ID NO: 9792
  Synthetic polynucleotide

SEQ ID NO: 9794 - DNA, 172 bp, Artificial Sequence
  Synthetic polynucleotide
atcatctcaccttgcctcctgtgagtggtgagtctatccctgcaggagcaattagcagaagcaattagctcgagcaattagcgacagcaattagcctaagcaattagcactagcaattagctgcagcaattagcgtaagcaattagcggcgcgccatgcttcatcagactct

SEQ ID NO: 9795 - DNA, 172 bp, Artificial Sequence; identical to SEQ ID NO: 9794
  Synthetic polynucleotide

SEQ ID NO: 9796 - DNA, 172 bp, Artificial Sequence
  Synthetic polynucleotide
atcatctcaccttgcctcctgagagcttctatgtctaccctgcaggaaggtgtgagagaaaggtgtgagtcgaaggtgtgaggacaaggtgtgagctaaaggtgtgagactaaggtgtgagtgcaaggtgtgaggtaaaggtgtgagggcgcgccatgcttcatcagactct

SEQ ID NO: 9797 - DNA, 172 bp, Artificial Sequence; identical to SEQ ID NO: 9796
  Synthetic polynucleotide

SEQ ID NO: 9798 - DNA, 188 bp, Artificial Sequence
  Synthetic polynucleotide
atcatctcaccttgcctcctgtatgttgtgctgcttaccctgcagggctatttttagcagagctatttttagctcggctatttttagcgacgctatttttagcctagctatttttagcactgctatttttagctgcgctatttttagcgtagctatttttagcggcgcgccatgcttcatcagactct

SEQ ID NO: 9799 - DNA, 188 bp, Artificial Sequence; identical to SEQ ID NO: 9798
  Synthetic polynucleotide

SEQ ID NO: 9800 - DNA, 172 bp, Artificial Sequence
  Synthetic polynucleotide
atcatctcaccttgcctcctgctcattgctgcttaacccctgcaggtattacgtaaagatattacgtaatcgtattacgtaagactattacgtaactatattacgtaaacttattacgtaatgctattacgtaagtatattacgtaaggcgcgccatgcttcatcagactct

SEQ ID NO: 9801 - DNA, 172 bp, Artificial Sequence; identical to SEQ ID NO: 9800
  Synthetic polynucleotide

SEQ ID NO: 9802 - DNA, 188 bp, Artificial Sequence
  Synthetic polynucleotide
atcatctcaccttgcctcctgcagccctagataactaccctgcaggggtgacgtaaggagaggtgacgtaaggtcgggtgacgtaagggacggtgacgtaaggctaggtgacgtaaggactggtgacgtaaggtgcggtgacgtaagggtaggtgacgtaaggggcgcgccatgcttcatcagactct

SEQ ID NO: 9803 - DNA, 188 bp, Artificial Sequence; identical to SEQ ID NO: 9802
  Synthetic polynucleotide

SEQ ID NO: 9804 - DNA, 188 bp, Artificial Sequence
  Synthetic polynucleotide
atcatctcaccttgcctcctggaaccattagattagcccctgcaggaatgccagacccagaaatgccagaccctcgaatgccagacccgacaatgccagacccctaaatgccagacccactaatgccagaccctgcaatgccagacccgtaaatgccagacccggcgcgccatgcttcatcagactct

SEQ ID NO: 9805 - DNA, 188 bp, Artificial Sequence; identical to SEQ ID NO: 9804
  Synthetic polynucleotide

SEQ ID NO: 9806 - DNA, 191 bp, Artificial Sequence
  Synthetic polynucleotide
atcatctcaccttgcctcctgtggcgaatcagaacatccctgcaggctgccctcatccaagatggcgagactgccctcatccaagatggcgtcgctgccctcatccaagatggcggacctgccctcatccaagatggcgctactgccctcatccaagatggcgactggcgcgccatgcttcatcagactct

SEQ ID NO: 9807 - DNA, 191 bp, Artificial Sequence; identical to SEQ ID NO: 9806
  Synthetic polynucleotide

SEQ ID NO: 9808 - DNA, 190 bp, Artificial Sequence
  Synthetic polynucleotide
atcatctcaccttgcctcctgtctacatgctttcaaggcctgcagggtaaagataggggaagagtaaagataggggatcggtaaagataggggagacgtaaagataggggactagtaaagataggggaactgtaaagataggggatgcgtaaagataggggagtaggcgcgccatgcttcatcagactct

SEQ ID NO: 9809 - DNA, 190 bp, Artificial Sequence; identical to SEQ ID NO: 9808
  Synthetic polynucleotide

SEQ ID NO: 9810 - DNA, 172 bp, Artificial Sequence
  Synthetic polynucleotide
atcatctcaccttgcctcctgacggtttgcggatcctacctgcaggaaggtgtgaaagaaaggtgtgaatcgaaggtgtgaagacaaggtgtgaactaaaggtgtgaaactaaggtgtgaatgcaaggtgtgaagtaaaggtgtgaaggcgcgccatgcttcatcagactct

SEQ ID NO: 9811 - DNA, 172 bp, Artificial Sequence; identical to SEQ ID NO: 9810
  Synthetic polynucleotide

SEQ ID NO: 9812 - DNA, 180 bp, Artificial Sequence
  Synthetic polynucleotide
atcatctcaccttgcctcctgcactggaatgagtatgtcctgcaggtgcgggggcggagatgcgggggcggtcgtgcgggggcgggactgcgggggcggctatgcgggggcggacttgcgggggcggtgctgcgggggcgggtatgcgggggcggggcgcgccatgcttcatcagactct

SEQ ID NO: 9813 - DNA, 180 bp, Artificial Sequence; identical to SEQ ID NO: 9812
  Synthetic polynucleotide

SEQ ID NO: 9814 - DNA, 164 bp, Artificial Sequence
  Synthetic polynucleotide
atcatctcaccttgcctcctgcaggcagctttcttgctcctgcaggggtggggaaagaggtggggaatcgggtggggaagacggtggggaactaggtggggaaactggtggggaatgcggtggggaagtaggtggggaaggcgcgccatgcttcatcagactct

SEQ ID NO: 9815 - DNA, 164 bp, Artificial Sequence; identical to SEQ ID NO: 9814
  Synthetic polynucleotide

SEQ ID NO: 9816 - DNA, 188 bp, Artificial Sequence
  Synthetic polynucleotide
atcatctcaccttgcctcctgtagaggctgggagaggacctgcaggtattacataacaagatattacataacatcgtattacataacagactattacataacactatattacataacaacttattacataacatgctattacataacagtatattacataacaggcgcgccatgcttcatcagactct

SEQ ID NO: 9817 - DNA, 188 bp, Artificial Sequence; identical to SEQ ID NO: 9816
  Synthetic polynucleotide

SEQ ID NO: 9818 - DNA, 191 bp, Artificial Sequence
  Synthetic polynucleotide
atcatctcaccttgcctcctgatgatggcacaggttaacctgcaggtcttggcaagtatccaaagatcttggcaagtatccaatcgtcttggcaagtatccaagactcttggcaagtatccaactatcttggcaagtatccaaacttcttggcaagtatccaatgcggcgcgccatgcttcatcagactct

SEQ ID NO: 9819 - DNA, 191 bp, Artificial Sequence; identical to SEQ ID NO: 9818
  Synthetic polynucleotide

SEQ ID NO: 9820 - DNA, 172 bp, Artificial Sequence
  Synthetic polynucleotide
atcatctcaccttgcctcctgaacgctcattcccaggccctgcaggtgggcgtggcagatgggcgtggctcgtgggcgtggcgactgggcgtggcctatgggcgtggcacttgggcgtggctgctgggcgtggcgtatgggcgtggcggcgcgccatgcttcatcagactct

SEQ ID NO: 9821 - DNA, 172 bp, Artificial Sequence; identical to SEQ ID NO: 9820
  Synthetic polynucleotide

SEQ ID NO: 9822 - DNA, 164 bp, Artificial Sequence
  Synthetic polynucleotide
atcatctcaccttgcctcctgccctttccgttaacccgcctgcaggcactgcattagacactgcatttcgcactgcattgaccactgcattctacactgcattactcactgcatttgccactgcattgtacactgcattggcgcgccatgcttcatcagactct

SEQ ID NO: 9823 - DNA, 164 bp, Artificial Sequence; identical to SEQ ID NO: 9822
  Synthetic polynucleotide

SEQ ID NO: 9824 - DNA, 191 bp, Artificial Sequence
  Synthetic polynucleotide
atcatctcaccttgcctcctgaaccctagctgaccaaacctgcaggcccattaattaatcaccagacccattaattaatcacctcgcccattaattaatcaccgaccccattaattaatcaccctacccattaattaatcaccactcccattaattaatcacctgcggcgcgccatgcttcatcagactct

SEQ ID NO: 9825 - DNA, 191 bp, Artificial Sequence; identical to SEQ ID NO: 9824
  Synthetic polynucleotide

SEQ ID NO: 9826 - DNA, 197 bp, Artificial Sequence
  Synthetic polynucleotide
atcatctcaccttgcctcctggcccgcaagtttaagtccctgcaggaactaattaccattatcgagaaactaattaccattatcgtcgaactaattaccattatcggacaactaattaccattatcgctaaactaattaccattatcgactaactaattaccattatcgtgcggcgcgccatgcttcatcagactct

SEQ ID NO: 9827 - DNA, 197 bp, Artificial Sequence; identical to SEQ ID NO: 9826
  Synthetic polynucleotide

SEQ ID NO: 9828 - DNA, 172 bp, Artificial Sequence
  Synthetic polynucleotide
atcatctcaccttgcctcctggtgacgtatgcgtctcgcctgcaggacccaggtggagaacccaggtggtcgacccaggtgggacacccaggtggctaacccaggtggactacccaggtggtgcacccaggtgggtaacccaggtggggcgcgccatgcttcatcagactct

SEQ ID NO: 9829 - DNA, 172 bp, Artificial Sequence; identical to SEQ ID NO: 9828
  Synthetic polynucleotide

SEQ ID NO: 9830 - DNA, 156 bp, Artificial Sequence
  Synthetic polynucleotide
atcatctcaccttgcctcctgtccaggttacttgaacgcctgcaggccattaaaagaccattaaatcgccattaaagacccattaaactaccattaaaactccattaaatgcccattaaagtaccattaaaggcgcgccatgcttcatcagactct

SEQ ID NO: 9831 - DNA, 156 bp, Artificial Sequence; identical to SEQ ID NO: 9830
  Synthetic polynucleotide

SEQ ID NO: 9832 - DNA, 172 bp, Artificial Sequence
  Synthetic polynucleotide
atcatctcaccttgcctcctgtccaatgtagaagcgcgcctgcaggtgacctctgaagatgacctctgatcgtgacctctgagactgacctctgactatgacctctgaacttgacctctgatgctgacctctgagtatgacctctgaggcgcgccatgcttcatcagactct

SEQ ID NO: 9833 - DNA, 172 bp, Artificial Sequence; identical to SEQ ID NO: 9832
  Synthetic polynucleotide

SEQ ID NO: 9834 - DNA, 190 bp, Artificial Sequence
  Synthetic polynucleotide
atcatctcaccttgcctcctgtcaatgcacaatcttgccctgcaggtcccattgttcttaagatcccattgttcttatcgtcccattgttcttagactcccattgttcttactatcccattgttcttaacttcccattgttcttatgctcccattgttcttagtaggcgcgccatgcttcatcagactct

SEQ ID NO: 9835 - DNA, 190 bp, Artificial Sequence; identical to SEQ ID NO: 9834
  Synthetic polynucleotide

SEQ ID NO: 9836 - DNA, 172 bp, Artificial Sequence
  Synthetic polynucleotide
atcatctcaccttgcctcctgtggtcccatgctatatgcctgcaggcttagcaacgagacttagcaacgtcgcttagcaacggaccttagcaacgctacttagcaacgactcttagcaacgtgccttagcaacggtacttagcaacgggcgcgccatgcttcatcagactct

SEQ ID NO: 9837 - DNA, 172 bp, Artificial Sequence; identical to SEQ ID NO: 9836
  Synthetic polynucleotide

SEQ ID NO: 9838 - DNA, 196 bp, Artificial Sequence
  Synthetic polynucleotide
atcatctcaccttgcctcctgatcaaccactactgttacctgcaggatattaattggttagaatattaattggtttcgatattaattggttgacatattaattggttctaatattaattggttactatattaattggtttgcatattaattggttgtaatattaattggttggcgcgccatgcttcatcagactct

SEQ ID NO: 9839 - DNA, 196 bp, Artificial Sequence; identical to SEQ ID NO: 9838
  Synthetic polynucleotide

SEQ ID NO: 9840 - DNA, 164 bp, Artificial Sequence
  Synthetic polynucleotide
atcatctcaccttgcctcctggtacaggatggtagttgcctgcaggaattgacatagaaattgacattcgaattgacatgacaattgacatctaaattgacatactaattgacattgcaattgacatgtaaattgacatggcgcgccatgcttcatcagactct

SEQ ID NO: 9841 - DNA, 164 bp, Artificial Sequence; identical to SEQ ID NO: 9840
  Synthetic polynucleotide

SEQ ID NO: 9842 - DNA, 188 bp, Artificial Sequence
  Synthetic polynucleotide
atcatctcaccttgcctcctgtacaagtccacaatacacctgcaggaaataattaacgagaaaataattaacgtcgaaataattaacggacaaataattaacgctaaaataattaacgactaaataattaacgtgcaaataattaacggtaaaataattaacgggcgcgccatgcttcatcagactct

SEQ ID NO: 9843 - DNA, 188 bp, Artificial Sequence; identical to SEQ ID NO: 9842
  Synthetic polynucleotide

SEQ ID NO: 9844 - DNA, 180 bp, Artificial Sequence
  Synthetic polynucleotide
atcatctcaccttgcctcctgtttctccaagtcatctacctgcaggtttcaagtggtagatttcaagtggttcgtttcaagtggtgactttcaagtggtctatttcaagtggtacttttcaagtggttgctttcaagtggtgtatttcaagtggtggcgcgccatgcttcatcagactct

SEQ ID NO: 9845 - DNA, 180 bp, Artificial Sequence; identical to SEQ ID NO: 9844
  Synthetic polynucleotide

SEQ ID NO: 9846 - DNA, 172 bp, Artificial Sequence
  Synthetic polynucleotide
atcatctcaccttgcctcctgttcgggccctatcataacctgcaggcgcccacgcaagacgcccacgcatcgcgcccacgcagaccgcccacgcactacgcccacgcaactcgcccacgcatgccgcccacgcagtacgcccacgcaggcgcgccatgcttcatcagactct

SEQ ID NO: 9847 - DNA, 172 bp, Artificial Sequence; identical to SEQ ID NO: 9846
  Synthetic polynucleotide

SEQ ID NO: 9848 - DNA, 197 bp, Artificial Sequence
  Synthetic polynucleotide
atcatctcaccttgcctcctggaaactctcccatgcgccctgcaggattatgttaaatcacagaattatgttaaatcactcgattatgttaaatcacgacattatgttaaatcacctaattatgttaaatcacactattatgttaaatcactgcattatgttaaatcacgtaggcgcgccatgcttcatcagactct

SEQ ID NO: 9849 - DNA, 197 bp, Artificial Sequence; identical to SEQ ID NO: 9848
  Synthetic polynucleotide

SEQ ID NO: 9850 - DNA, 156 bp, Artificial Sequence
  Synthetic polynucleotide
atcatctcaccttgcctcctgaaccatacgttgcaatacctgcaggaggaatttagaaggaattttcgaggaatttgacaggaatttctaaggaatttactaggaattttgcaggaatttgtaaggaatttggcgcgccatgcttcatcagactct

SEQ ID NO: 9851 - DNA, 156 bp, Artificial Sequence; identical to SEQ ID NO: 9850
  Synthetic polynucleotide

SEQ ID NO: 9852 - DNA, 191 bp, Artificial Sequence
  Synthetic polynucleotide
atcatctcaccttgcctcctgaccacgcaatcgacgaccctgcaggcggaatgcagtgcgattagacggaatgcagtgcgatttcgcggaatgcagtgcgattgaccggaatgcagtgcgattctacggaatgcagtgcgattactcggaatgcagtgcgatttgcggcgcgccatgcttcatcagactct

SEQ ID NO: 9853 - DNA, 191 bp, Artificial Sequence; identical to SEQ ID NO: 9852
  Synthetic polynucleotide

SEQ ID NO: 9854 - DNA, 172 bp, Artificial Sequence
  Synthetic polynucleotide
atcatctcaccttgcctcctgatctgccagctgcaaaccctgcagggtataattagagagtataattagtcggtataattaggacgtataattagctagtataattagactgtataattagtgcgtataattaggtagtataattagggcgcgccatgcttcatcagactct

SEQ ID NO: 9855 - DNA, 172 bp, Artificial Sequence; identical to SEQ ID NO: 9854
  Synthetic polynucleotide

SEQ ID NO: 9856 - DNA, 164 bp, Artificial Sequence
  Synthetic polynucleotide
atcatctcaccttgcctcctgatgccgcagttacccatcctgcaggctagggttaagactagggttatcgctagggttagacctagggttactactagggttaactctagggttatgcctagggttagtactagggttaggcgcgccatgcttcatcagactct

SEQ ID NO: 9857 - DNA, 164 bp, Artificial Sequence; identical to SEQ ID NO: 9856
  Synthetic polynucleotide

SEQ ID NO: 9858 - DNA, 196 bp, Artificial Sequence
  Synthetic polynucleotide
atcatctcaccttgcctcctgagctttaggctcagacgcctgcaggtgttgctagggaaagatgttgctagggaatcgtgttgctagggaagactgttgctagggaactatgttgctagggaaacttgttgctagggaatgctgttgctagggaagtatgttgctagggaaggcgcgccatgcttcatcagactct

SEQ ID NO: 9859 - DNA, 196 bp, Artificial Sequence; identical to SEQ ID NO: 9858
  Synthetic polynucleotide

SEQ ID NO: 9860 - DNA, 196 bp, Artificial Sequence
  Synthetic polynucleotide
atcatctcaccttgcctcctgacttgtacggcctaagacctgcaggccgccacgagcccagaccgccacgagccctcgccgccacgagcccgacccgccacgagcccctaccgccacgagcccactccgccacgagccctgcccgccacgagcccgtaccgccacgagcccggcgcgccatgcttcatcagactct

SEQ ID NO: 9861 - DNA, 196 bp, Artificial Sequence; identical to SEQ ID NO: 9860
  Synthetic polynucleotide

SEQ ID NO: 9862 - DNA, 191 bp, Artificial Sequence
  Synthetic polynucleotide
atcatctcaccttgcctcctgtttatctccaaccgacgcctgcaggtaggtcagtcaaggtcaagataggtcagtcaaggtcatcgtaggtcagtcaaggtcagactaggtcagtcaaggtcactataggtcagtcaaggtcaacttaggtcagtcaaggtcatgcggcgcgccatgcttcatcagactct

SEQ ID NO: 9863 - DNA, 191 bp, Artificial Sequence; identical to SEQ ID NO: 9862
  Synthetic polynucleotide

SEQ ID NO: 9864 - DNA, 197 bp, Artificial Sequence
  Synthetic polynucleotide
atcatctcaccttgcctcctgtggcttcgccggacattcctgcaggctttcactttcacttagactttcactttcactttcgctttcactttcacttgacctttcactttcacttctactttcactttcacttactctttcactttcactttgcctttcactttcacttgtaggcgcgccatgcttcatcagactct

SEQ ID NO: 9865 - DNA, 197 bp, Artificial Sequence; identical to SEQ ID NO: 9864
  Synthetic polynucleotide

SEQ ID NO: 9866 - DNA, 172 bp, Artificial Sequence
  Synthetic polynucleotide
atcatctcaccttgcctcctggtccatacaggtgcgaacctgcaggtatgttcctaagatatgttcctatcgtatgttcctagactatgttcctactatatgttcctaacttatgttcctatgctatgttcctagtatatgttcctaggcgcgccatgcttcatcagactct

SEQ ID NO: 9867 - DNA, 172 bp, Artificial Sequence; identical to SEQ ID NO: 9866
  Synthetic polynucleotide

SEQ ID NO: 9868 - DNA, 190 bp, Artificial Sequence
  Synthetic polynucleotide
atcatctcaccttgcctcctgaccatatcgccgagtggcctgcaggatttcgtatccccgagaatttcgtatccccgtcgatttcgtatccccggacatttcgtatccccgctaatttcgtatccccgactatttcgtatccccgtgcatttcgtatccccggtaggcgcgccatgcttcatcagactct

SEQ ID NO: 9869 - DNA, 190 bp, Artificial Sequence; identical to SEQ ID NO: 9868
  Synthetic polynucleotide

SEQ ID NO: 9870 - DNA, 191 bp, Artificial Sequence
  Synthetic polynucleotide
atcatctcaccttgcctcctgcatccgatctgttcgctcctgcagggtttcttaattaattcgagagtttcttaattaattcgtcggtttcttaattaattcggacgtttcttaattaattcgctagtttcttaattaattcgactgtttcttaattaattcgtgcggcgcgccatgcttcatcagactct

SEQ ID NO: 9871 - DNA, 191 bp, Artificial Sequence; identical to SEQ ID NO: 9870
  Synthetic polynucleotide

SEQ ID NO: 9872 - DNA, 148 bp, Artificial Sequence
  Synthetic polynucleotide
atcatctcaccttgcctcctgtcactcaagacatttggcctgcaggacaaagaagaacaaagatcgacaaagagacacaaagactaacaaagaactacaaagatgcacaaagagtaacaaagaggcgcgccatgcttcatcagactct

SEQ ID NO: 9873 - DNA, 148 bp, Artificial Sequence; identical to SEQ ID NO: 9872
  Synthetic polynucleotide

SEQ ID NO: 9874 - DNA, 172 bp, Artificial Sequence
  Synthetic polynucleotide
atcatctcaccttgcctcctggcgccaattatgaaacgcctgcaggttgtaaacaaagattgtaaacaatcgttgtaaacaagacttgtaaacaactattgtaaacaaactttgtaaacaatgcttgtaaacaagtattgtaaacaaggcgcgccatgcttcatcagactct

SEQ ID NO: 9875 - DNA, 172 bp, Artificial Sequence; identical to SEQ ID NO: 9874
  Synthetic polynucleotide

SEQ ID NO: 9876 - DNA, 188 bp, Artificial Sequence
  Synthetic polynucleotide
atcatctcaccttgcctcctgttggtatcctaaccgatcctgcagggctatttatagcagagctatttatagctcggctatttatagcgacgctatttatagcctagctatttatagcactgctatttatagctgcgctatttatagcgtagctatttatagcggcgcgccatgcttcatcagactct

SEQ ID NO: 9877 - DNA, 188 bp, Artificial Sequence; identical to SEQ ID NO: 9876
  Synthetic polynucleotide

SEQ ID NO: 9878 - DNA, 200 bp, Artificial Sequence
  Synthetic polynucleotide
atcatctcaccttgcctcctggtgactggcactacagtcctgcaggctagaacacagtgtacccaagactagaacacagtgtacccatcgctagaacacagtgtacccagacctagaacacagtgtacccactactagaacacagtgtacccaactctagaacacagtgtacccaggcgcgccatgcttcatcagactct

SEQ ID NO: 9879 - DNA, 200 bp, Artificial Sequence; identical to SEQ ID NO: 9878
  Synthetic polynucleotide

SEQ ID NO: 9880 - DNA, 172 bp, Artificial Sequence
  Synthetic polynucleotide
atcatctcaccttgcctcctgatcagtaatggtgggttcctgcagggaaagtgaaaagagaaagtgaaatcggaaagtgaaagacgaaagtgaaactagaaagtgaaaactgaaagtgaaatgcgaaagtgaaagtagaaagtgaaaggcgcgccatgcttcatcagactct

SEQ ID NO: 9881 - DNA, 172 bp, Artificial Sequence; identical to SEQ ID NO: 9880
  Synthetic polynucleotide

SEQ ID NO: 9882 - DNA, 172 bp, Artificial Sequence
  Synthetic polynucleotide
atcatctcaccttgcctcctggatgcagtgtggtcccacctgcaggatgactcaccagaatgactcacctcgatgactcaccgacatgactcaccctaatgactcaccactatgactcacctgcatgactcaccgtaatgactcaccggcgcgccatgcttcatcagactct

SEQ ID NO: 9883 - DNA, 172 bp, Artificial Sequence; identical to SEQ ID NO: 9882
  Synthetic polynucleotide

SEQ ID NO: 9884 - DNA, 190 bp, Artificial Sequence
  Synthetic polynucleotide
atcatctcaccttgcctcctgagcgagcttcaacacgccctgcaggaggaagggaaaggaagaaggaagggaaaggatcgaggaagggaaaggagacaggaagggaaaggactaaggaagggaaaggaactaggaagggaaaggatgcaggaagggaaaggagtaggcgcgccatgcttcatcagactct

SEQ ID NO: 9885 - DNA, 190 bp, Artificial Sequence; identical to SEQ ID NO: 9884
  Synthetic polynucleotide

SEQ ID NO: 9886 - DNA, 172 bp, Artificial Sequence
  Synthetic polynucleotide
atcatctcaccttgcctcctgacgagtcactgcatgctcctgcaggagcaattaacagaagcaattaactcgagcaattaacgacagcaattaacctaagcaattaacactagcaattaactgcagcaattaacgtaagcaattaacggcgcgccatgcttcatcagactct

SEQ ID NO: 9887 - DNA, 172 bp, Artificial Sequence; identical to SEQ ID NO: 9886
  Synthetic polynucleotide

SEQ ID NO: 9888 - DNA, 172 bp, Artificial Sequence
  Synthetic polynucleotide
atcatctcaccttgcctcctgtttcggttgacgcagcccctgcaggcaagatggcgagacaagatggcgtcgcaagatggcggaccaagatggcgctacaagatggcgactcaagatggcgtgccaagatggcggtacaagatggcgggcgcgccatgcttcatcagactct

SEQ ID NO: 9889 - DNA, 172 bp, Artificial Sequence; identical to SEQ ID NO: 9888
  Synthetic polynucleotide

SEQ ID NO: 9890 - DNA, 190 bp, Artificial Sequence
  Synthetic polynucleotide
atcatctcaccttgcctcctgccttagttggtcgcttacctgcaggcggccacgtgacccagacggccacgtgaccctcgcggccacgtgacccgaccggccacgtgacccctacggccacgtgacccactcggccacgtgaccctgccggccacgtgacccgtaggcgcgccatgcttcatcagactct

SEQ ID NO: 9891 - DNA, 190 bp, Artificial Sequence; identical to SEQ ID NO: 9890
  Synthetic polynucleotide

SEQ ID NO: 9892 - DNA, 172 bp, Artificial Sequence
  Synthetic polynucleotide
atcatctcaccttgcctcctgtggaatcgtaagggcgacctgcaggagaatgttcgagaagaatgttcgtcgagaatgttcggacagaatgttcgctaagaatgttcgactagaatgttcgtgcagaatgttcggtaagaatgttcgggcgcgccatgcttcatcagactct

SEQ ID NO: 9893 - DNA, 172 bp, Artificial Sequence; identical to SEQ ID NO: 9892
  Synthetic polynucleotide

SEQ ID NO: 9894 - DNA, 188 bp, Artificial Sequence
  Synthetic polynucleotide
atcatctcaccttgcctcctgcagtgtttgaaaggtctcctgcaggagtcagcattttagaagtcagcatttttcgagtcagcattttgacagtcagcattttctaagtcagcattttactagtcagcatttttgcagtcagcattttgtaagtcagcattttggcgcgccatgcttcatcagactct

SEQ ID NO: 9895 - DNA, 188 bp, Artificial Sequence; identical to SEQ ID NO: 9894
  Synthetic polynucleotide

SEQ ID NO: 9896 - DNA, 190 bp, Artificial Sequence
  Synthetic polynucleotide
atcatctcaccttgcctcctgcttagaccgcgtatttccctgcaggataataatatttttagaataataatattttttcgataataatatttttgacataataatatttttctaataataatatttttactataataatattttttgcataataatatttttgtaggcgcgccatgcttcatcagactct

SEQ ID NO: 9897 - DNA, 190 bp, Artificial Sequence; identical to SEQ ID NO: 9896
  Synthetic polynucleotide

SEQ ID NO: 9898 - DNA, 172 bp, Artificial Sequence
  Synthetic polynucleotide
atcatctcaccttgcctcctggggtcttatgcattggacctgcaggccaccaggggagaccaccaggggtcgccaccagggggacccaccaggggctaccaccaggggactccaccaggggtgcccaccagggggtaccaccaggggggcgcgccatgcttcatcagactct

SEQ ID NO: 9899 - DNA, 172 bp, Artificial Sequence; identical to SEQ ID NO: 9898
  Synthetic polynucleotide

SEQ ID NO: 9900 - DNA, 172 bp, Artificial Sequence
  Synthetic polynucleotide
atcatctcaccttgcctcctgaagtaggacagaaggaacctgcagggtgactcaccagagtgactcacctcggtgactcaccgacgtgactcaccctagtgactcaccactgtgactcacctgcgtgactcaccgtagtgactcaccggcgcgccatgcttcatcagactct

SEQ ID NO: 9901 - DNA, 172 bp, Artificial Sequence; identical to SEQ ID NO: 9900
  Synthetic polynucleotide

SEQ ID NO: 9902 - DNA, 190 bp, Artificial Sequence
  Synthetic polynucleotide
atcatctcaccttgcctcctgatccagcaagtgatttccctgcaggttttggcgccaaaaagattttggcgccaaaatcgttttggcgccaaaagacttttggcgccaaaactattttggcgccaaaaactttttggcgccaaaatgcttttggcgccaaaagtaggcgcgccatgcttcatcagactct

SEQ ID NO: 9903 - DNA, 190 bp, Artificial Sequence; identical to SEQ ID NO: 9902
  Synthetic polynucleotide

SEQ ID NO: 9904 - DNA, 164 bp, Artificial Sequence
  Synthetic polynucleotide
atcatctcaccttgcctcctggcagctagcagccatttcctgcaggtggaaaactagatggaaaacttcgtggaaaactgactggaaaactctatggaaaactacttggaaaacttgctggaaaactgtatggaaaactggcgcgccatgcttcatcagactct

SEQ ID NO: 9905 - DNA, 164 bp, Artificial Sequence; identical to SEQ ID NO: 9904
  Synthetic polynucleotide

SEQ ID NO: 9906 - DNA, 197 bp, Artificial Sequence
  Synthetic polynucleotide
atcatctcaccttgcctcctggcaattagtatgtaccccctgcaggatgaatttcattcatagaatgaatttcattcattcgatgaatttcattcatgacatgaatttcattcatctaatgaatttcattcatactatgaatttcattcattgcatgaatttcattcatgtaggcgcgccatgcttcatcagactct

SEQ ID NO: 9907 - DNA, 197 bp, Artificial Sequence; identical to SEQ ID NO: 9906
  Synthetic polynucleotide

SEQ ID NO: 9908 - DNA, 196 bp, Artificial Sequence
  Synthetic polynucleotide
atcatctcaccttgcctcctggaattacgacggcggaccctgcaggctaattaaaagtgagactaattaaaagtgtcgctaattaaaagtggacctaattaaaagtgctactaattaaaagtgactctaattaaaagtgtgcctaattaaaagtggtactaattaaaagtgggcgcgccatgcttcatcagactct

SEQ ID NO: 9909 - DNA, 196 bp, Artificial Sequence; identical to SEQ ID NO: 9908
  Synthetic polynucleotide

SEQ ID NO: 9910 - DNA, 191 bp, Artificial Sequence
  Synthetic polynucleotide
atcatctcaccttgcctcctgaaccatgaccgcatgaccctgcaggtgaaccggattaatgaaagatgaaccggattaatgaatcgtgaaccggattaatgaagactgaaccggattaatgaactatgaaccggattaatgaaacttgaaccggattaatgaatgcggcgcgccatgcttcatcagactct

SEQ ID NO: 9911 - DNA, 191 bp, Artificial Sequence; identical to SEQ ID NO: 9910
  Synthetic polynucleotide

SEQ ID NO: 9912 - DNA, 180 bp, Artificial Sequence
  Synthetic polynucleotide
atcatctcaccttgcctcctggcagaataactcgagctcctgcaggtttcccagaagagatttcccagaagtcgtttcccagaaggactttcccagaagctatttcccagaagacttttcccagaagtgctttcccagaaggtatttcccagaagggcgcgccatgcttcatcagactct

SEQ ID NO: 9913 - DNA, 180 bp, Artificial Sequence; identical to SEQ ID NO: 9912
  Synthetic polynucleotide

SEQ ID NO: 9914 - DNA, 196 bp, Artificial Sequence
  Synthetic polynucleotide
atcatctcaccttgcctcctgatgcgcgaaacttgtctcctgcaggccccttatctgatagaccccttatctgattcgccccttatctgatgacccccttatctgatctaccccttatctgatactccccttatctgattgcccccttatctgatgtaccccttatctgatggcgcgccatgcttcatcagactct

SEQ ID NO: 9915 - DNA, 196 bp, Artificial Sequence; identical to SEQ ID NO: 9914
  Synthetic polynucleotide

SEQ ID NO: 9916 - DNA, 185 bp, Artificial Sequence
  Synthetic polynucleotide
atcatctcaccttgcctcctgcgtatgtcggacacagacctgcagggggatgacgtcatcggagagggatgacgtcatcggtcggggatgacgtcatcgggacgggatgacgtcatcggctagggatgacgtcatcggactgggatgacgtcatcggtgcggcgcgccatgcttcatcagactct

SEQ ID NO: 9917 - DNA, 185 bp, Artificial Sequence; identical to SEQ ID NO: 9916
  Synthetic polynucleotide

SEQ ID NO: 9918 - DNA, 164 bp, Artificial Sequence
  Synthetic polynucleotide
atcatctcaccttgcctcctgacgtcacgctccgttctcctgcaggtgatgtaatagatgatgtaattcgtgatgtaatgactgatgtaatctatgatgtaatacttgatgtaattgctgatgtaatgtatgatgtaatggcgcgccatgcttcatcagactct

SEQ ID NO: 9919 - DNA, 164 bp, Artificial Sequence; identical to SEQ ID NO: 9918
  Synthetic polynucleotide

SEQ ID NO: 9920 - DNA, 197 bp, Artificial Sequence
  Synthetic polynucleotide
atcatctcaccttgcctcctgcgtacatgttgcccgtgcctgcaggatgaattgcagtcatagaatgaattgcagtcattcgatgaattgcagtcatgacatgaattgcagtcatctaatgaattgcagtcatactatgaattgcagtcattgcatgaattgcagtcatgtaggcgcgccatgcttcatcagactct

SEQ ID NO: 9921 - DNA, 197 bp, Artificial Sequence; identical to SEQ ID NO: 9920
  Synthetic polynucleotide

SEQ ID NO: 9922 - DNA, 164 bp, Artificial Sequence
  Synthetic polynucleotide
atcatctcaccttgcctcctgacctcctcctcaatattcctgcaggggcaataaaagaggcaataaatcgggcaataaagacggcaataaactaggcaataaaactggcaataaatgcggcaataaagtaggcaataaaggcgcgccatgcttcatcagactct

SEQ ID NO: 9923 - DNA, 164 bp, Artificial Sequence; identical to SEQ ID NO: 9922
  Synthetic polynucleotide

SEQ ID NO: 9924 - DNA, 172 bp, Artificial Sequence
  Synthetic polynucleotide
atcatctcaccttgcctcctgtcacgaatcaccagcttcctgcagggggggcgtaaagagggggcgtaatcggggggcgtaagacgggggcgtaactagggggcgtaaactgggggcgtaatgcgggggcgtaagtagggggcgtaaggcgcgccatgcttcatcagactct

SEQ ID NO: 9925 - DNA, 172 bp, Artificial Sequence; identical to SEQ ID NO: 9924
  Synthetic polynucleotide

SEQ ID NO: 9926 - DNA, 156 bp, Artificial Sequence
  Synthetic polynucleotide
atcatctcaccttgcctcctggtgggcgtgccgaatttcctgcaggcaattaaaagacaattaaatcgcaattaaagaccaattaaactacaattaaaactcaattaaatgccaattaaagtacaattaaaggcgcgccatgcttcatcagactct

SEQ ID NO: 9927 - DNA, 156 bp, Artificial Sequence; identical to SEQ ID NO: 9926
  Synthetic polynucleotide

SEQ ID NO: 9928 - DNA, 188 bp, Artificial Sequence
  Synthetic polynucleotide
atcatctcaccttgcctcctgctacgtgtggtgacctacctgcagggaacacaacaaaagagaacacaacaaatcggaacacaacaaagacgaacacaacaaactagaacacaacaaaactgaacacaacaaatgcgaacacaacaaagtagaacacaacaaaggcgcgccatgcttcatcagactct

SEQ ID NO: 9929 - DNA, 188 bp, Artificial Sequence; identical to SEQ ID NO: 9928
  Synthetic polynucleotide

SEQ ID NO: 9930 - DNA, 190 bp, Artificial Sequence
  Synthetic polynucleotide
atcatctcaccttgcctcctgcccttacctcgtgagatcctgcaggctgacctggaactcagactgacctggaactctcgctgacctggaactcgacctgacctggaactcctactgacctggaactcactctgacctggaactctgcctgacctggaactcgtaggcgcgccatgcttcatcagactct

SEQ ID NO: 9931 - DNA, 190 bp, Artificial Sequence; identical to SEQ ID NO: 9930
  Synthetic polynucleotide

SEQ ID NO: 9932 - DNA, 156 bp, Artificial Sequence
  Synthetic polynucleotide
atcatctcaccttgcctcctggtagaaacgataccaggcctgcaggtctaattaagatctaattatcgtctaattagactctaattactatctaattaacttctaattatgctctaattagtatctaattaggcgcgccatgcttcatcagactct

SEQ ID NO: 9933 - DNA, 156 bp, Artificial Sequence; identical to SEQ ID NO: 9932
  Synthetic polynucleotide

SEQ ID NO: 9934 - DNA, 172 bp, Artificial Sequence
  Synthetic polynucleotide
atcatctcaccttgcctcctgtaactccgttcaagagacctgcaggaattaaagcaagaaattaaagcatcgaattaaagcagacaattaaagcactaaattaaagcaactaattaaagcatgcaattaaagcagtaaattaaagcaggcgcgccatgcttcatcagactct

SEQ ID NO: 9935 - DNA, 172 bp, Artificial Sequence; identical to SEQ ID NO: 9934
  Synthetic polynucleotide

SEQ ID NO: 9936 - DNA, 190 bp, Artificial Sequence
  Synthetic polynucleotide
atcatctcaccttgcctcctggactggtcgccttatctcctgcaggggttaatgaccttgagaggttaatgaccttgtcgggttaatgaccttggacggttaatgaccttgctaggttaatgaccttgactggttaatgaccttgtgcggttaatgaccttggtaggcgcgccatgcttcatcagactct

SEQ ID NO: 9937 - DNA, 190 bp, Artificial Sequence; identical to SEQ ID NO: 9936
  Synthetic polynucleotide

SEQ ID NO: 9938 - DNA, 156 bp, Artificial Sequence
  Synthetic polynucleotide
atcatctcaccttgcctcctgtagaggcacatatttctcctgcaggatatgcatagaatatgcattcgatatgcatgacatatgcatctaatatgcatactatatgcattgcatatgcatgtaatatgcatggcgcgccatgcttcatcagactct

SEQ ID NO: 9939 - DNA, 156 bp, Artificial Sequence; identical to SEQ ID NO: 9938
  Synthetic polynucleotide

SEQ ID NO: 9940 - DNA, 196 bp, Artificial Sequence
  Synthetic polynucleotide
atcatctcaccttgcctcctgttagccggagatacatgcctgcaggtgccctgagggcaagatgccctgagggcatcgtgccctgagggcagactgccctgagggcactatgccctgagggcaacttgccctgagggcatgctgccctgagggcagtatgccctgagggcaggcgcgccatgcttcatcagactct

SEQ ID NO: 9941 - DNA, 196 bp, Artificial Sequence; identical to SEQ ID NO: 9940
  Synthetic polynucleotide

SEQ ID NO: 9942 - DNA, 191 bp, Artificial Sequence
  Synthetic polynucleotide
atcatctcaccttgcctcctggagtgacggacgaatcacctgcaggggggaggagggaggggaggagagaggggaggagggaggggaggagtcgggggaggagggaggggaggaggacggggaggagggaggggaggagctaggggaggagggaggggaggagactggcgcgccatgcttcatcagactct

SEQ ID NO: 9943 - DNA, 191 bp, Artificial Sequence; identical to SEQ ID NO: 9942
  Synthetic polynucleotide

SEQ ID NO: 9944 - DNA, 197 bp, Artificial Sequence
  Synthetic polynucleotide
atcatctcaccttgcctcctgttgaagggtagagggaacctgcaggtgctgtgatttatttagatgctgtgatttattttcgtgctgtgatttatttgactgctgtgatttatttctatgctgtgatttatttacttgctgtgatttattttgctgctgtgatttatttgtaggcgcgccatgcttcatcagactct

SEQ ID NO: 9945 - DNA, 197 bp, Artificial Sequence; identical to SEQ ID NO: 9944
  Synthetic polynucleotide

SEQ ID NO: 9946 - DNA, 164 bp, Artificial Sequence
  Synthetic polynucleotide
atcatctcaccttgcctcctgaggtacagattccgtgccctgcaggcacatggccagacacatggcctcgcacatggccgaccacatggccctacacatggccactcacatggcctgccacatggccgtacacatggccggcgcgccatgcttcatcagactct

SEQ ID NO: 9947 - DNA, 164 bp, Artificial Sequence; identical to SEQ ID NO: 9946
  Synthetic polynucleotide

SEQ ID NO: 9948 - DNA, 191 bp, Artificial Sequence
  Synthetic polynucleotide
atcatctcaccttgcctcctgagatagacttccttgttcctgcaggaggtcaaactgtgacctagaaggtcaaactgtgaccttcgaggtcaaactgtgacctgacaggtcaaactgtgacctctaaggtcaaactgtgacctactaggtcaaactgtgaccttgcggcgcgccatgcttcatcagactct

SEQ ID NO: 9949 - DNA, 191 bp, Artificial Sequence; identical to SEQ ID NO: 9948
  Synthetic polynucleotide

SEQ ID NO: 9950 - DNA, 188 bp, Artificial Sequence
  Synthetic polynucleotide
atcatctcaccttgcctcctgctagtgttgcgggagttcctgcaggcgttatgtaacgagacgttatgtaacgtcgcgttatgtaacggaccgttatgtaacgctacgttatgtaacgactcgttatgtaacgtgccgttatgtaacggtacgttatgtaacgggcgcgccatgcttcatcagactct

SEQ ID NO: 9951 - DNA, 188 bp, Artificial Sequence; identical to SEQ ID NO: 9950
  Synthetic polynucleotide

SEQ ID NO: 9952 - DNA, 190 bp, Artificial Sequence
  Synthetic polynucleotide
atcatctcaccttgcctcctgggttcctttaagctacccctgcaggaaagtcaaaagtcaagaaaagtcaaaagtcatcgaaagtcaaaagtcagacaaagtcaaaagtcactaaaagtcaaaagtcaactaaagtcaaaagtcatgcaaagtcaaaagtcagtaggcgcgccatgcttcatcagactct

SEQ ID NO: 9953 - DNA, 190 bp, Artificial Sequence; identical to SEQ ID NO: 9952
  Synthetic polynucleotide

SEQ ID NO: 9954 - DNA, 197 bp, Artificial Sequence
  Synthetic polynucleotide
atcatctcaccttgcctcctgcgggatatgcgggtaagcctgcagggacagatggtgcggtagagacagatggtgcggttcggacagatggtgcggtgacgacagatggtgcggtctagacagatggtgcggtactgacagatggtgcggttgcgacagatggtgcggtgtaggcgcgccatgcttcatcagactct

SEQ ID NO: 9955 - DNA, 197 bp, Artificial Sequence; identical to SEQ ID NO: 9954
  Synthetic polynucleotide

SEQ ID NO: 9956 - DNA, 185 bp, Artificial Sequence
  Synthetic polynucleotide
atcatctcaccttgcctcctgatctcttcccgaattgtcctgcaggattctatttatagcttagaattctatttatagctttcgattctatttatagcttgacattctatttatagcttctaattctatttatagcttactattctatttatagctttgcggcgcgccatgcttcatcagactct

SEQ ID NO: 9957 - DNA, 185 bp, Artificial Sequence; identical to SEQ ID NO: 9956
  Synthetic polynucleotide

SEQ ID NO: 9958 - DNA, 190 bp, Artificial Sequence
  Synthetic polynucleotide
atcatctcaccttgcctcctgtatgaagggtggaatctcctgcaggcacccccgggggggagacacccccgggggggtcgcacccccggggggggaccacccccgggggggctacacccccgggggggactcacccccgggggggtgccacccccggggggggtaggcgcgccatgcttcatcagactct

SEQ ID NO: 9959 - DNA, 190 bp, Artificial Sequence; identical to SEQ ID NO: 9958
  Synthetic polynucleotide

SEQ ID NO: 9960 - DNA, 197 bp, Artificial Sequence
  Synthetic polynucleotide
atcatctcaccttgcctcctgtgtcctaggctaccaaccctgcaggtaaataaacatttcaagataaataaacatttcatcgtaaataaacatttcagactaaataaacatttcactataaataaacatttcaacttaaataaacatttcatgctaaataaacatttcagtaggcgcgccatgcttcatcagactct

SEQ ID NO: 9961 - DNA, 197 bp, Artificial Sequence; identical to SEQ ID NO: 9960
  Synthetic polynucleotide

SEQ ID NO: 9962 - DNA, 172 bp, Artificial Sequence
  Synthetic polynucleotide
atcatctcaccttgcctcctgcagataaagaccggtaacctgcaggtcacgtggccagatcacgtggcctcgtcacgtggccgactcacgtggccctatcacgtggccacttcacgtggcctgctcacgtggccgtatcacgtggccggcgcgccatgcttcatcagactct

SEQ ID NO: 9963 - DNA, 172 bp, Artificial Sequence; identical to SEQ ID NO: 9962
  Synthetic polynucleotide

SEQ ID NO: 9964 - DNA, 172 bp, Artificial Sequence
  Synthetic polynucleotide
atcatctcaccttgcctcctgagattccaccacgggttcctgcaggacttggcaccagaacttggcacctcgacttggcaccgacacttggcaccctaacttggcaccactacttggcacctgcacttggcaccgtaacttggcaccggcgcgccatgcttcatcagactct

SEQ ID NO: 9965 - DNA, 172 bp, Artificial Sequence; identical to SEQ ID NO: 9964
  Synthetic polynucleotide

SEQ ID NO: 9966 - DNA, 190 bp, Artificial Sequence
  Synthetic polynucleotide
atcatctcaccttgcctcctgtcctgtgaggaaggaaacctgcaggtggtctagcctcgaagatggtctagcctcgatcgtggtctagcctcgagactggtctagcctcgactatggtctagcctcgaacttggtctagcctcgatgctggtctagcctcgagtaggcgcgccatgcttcatcagactct

SEQ ID NO: 9967 - DNA, 190 bp, Artificial Sequence; identical to SEQ ID NO: 9966
  Synthetic polynucleotide

SEQ ID NO: 9968 - DNA, 188 bp, Artificial Sequence
  Synthetic polynucleotide
atcatctcaccttgcctcctgtagaggttaaaccttcacctgcaggagaacaaagcgcagaagaacaaagcgctcgagaacaaagcgcgacagaacaaagcgcctaagaacaaagcgcactagaacaaagcgctgcagaacaaagcgcgtaagaacaaagcgcggcgcgccatgcttcatcagactct

SEQ ID NO: 9969 - DNA, 188 bp, Artificial Sequence; identical to SEQ ID NO: 9968
  Synthetic polynucleotide

SEQ ID NO: 9970 - DNA, 185 bp, Artificial Sequence
  Synthetic polynucleotide
atcatctcaccttgcctcctgaggtggtcggaccttaccctgcaggtgaattttattacctaagatgaattttattacctatcgtgaattttattacctagactgaattttattacctactatgaattttattacctaacttgaattttattacctatgcggcgcgccatgcttcatcagactct

SEQ ID NO: 9971 - DNA, 185 bp, Artificial Sequence; identical to SEQ ID NO: 9970
  Synthetic polynucleotide

SEQ ID NO: 9972 - DNA, 156 bp, Artificial Sequence
  Synthetic polynucleotide
atcatctcaccttgcctcctgtccgcagtactaacgaccctgcaggcaattaagagacaattaagtcgcaattaaggaccaattaagctacaattaagactcaattaagtgccaattaaggtacaattaagggcgcgccatgcttcatcagactct

SEQ ID NO: 9973 - DNA, 156 bp, Artificial Sequence; identical to SEQ ID NO: 9972
  Synthetic polynucleotide

SEQ ID NO: 9974 - DNA, 197 bp, Artificial Sequence
  Synthetic polynucleotide
atcatctcaccttgcctcctggatttgcgaagtttgcacctgcaggagctgtcactcacctagaagctgtcactcaccttcgagctgtcactcacctgacagctgtcactcacctctaagctgtcactcacctactagctgtcactcaccttgcagctgtcactcacctgtaggcgcgccatgcttcatcagactct

SEQ ID NO: 9975 - DNA, 197 bp, Artificial Sequence; identical to SEQ ID NO: 9974
  Synthetic polynucleotide

SEQ ID NO: 9976 - DNA, 197 bp, Artificial Sequence
  Synthetic polynucleotide
atcatctcaccttgcctcctgcgttgagcgtatgaatacctgcaggaaatctcgcgagaacagaaaatctcgcgagaactcgaaatctcgcgagaacgacaaatctcgcgagaacctaaaatctcgcgagaacactaaatctcgcgagaactgcaaatctcgcgagaacgtaggcgcgccatgcttcatcagactct

SEQ ID NO: 9977 - DNA, 197 bp, Artificial Sequence; identical to SEQ ID NO: 9976
  Synthetic polynucleotide

SEQ ID NO: 9978 - DNA, 156 bp, Artificial Sequence
  Synthetic polynucleotide
atcatctcaccttgcctcctgctggatctctcgaactgcctgcaggccttcctgagaccttcctgtcgccttcctggacccttcctgctaccttcctgactccttcctgtgcccttcctggtaccttcctgggcgcgccatgcttcatcagactct

SEQ ID NO: 9979 - DNA, 156 bp, Artificial Sequence; identical to SEQ ID NO: 9978
  Synthetic polynucleotide

SEQ ID NO: 9980 - DNA, 172 bp, Artificial Sequence
  Synthetic polynucleotide
atcatctcaccttgcctcctgtctctcaggtgtggatgcctgcaggagtttcgtttagaagtttcgttttcgagtttcgtttgacagtttcgtttctaagtttcgtttactagtttcgttttgcagtttcgtttgtaagtttcgtttggcgcgccatgcttcatcagactct

SEQ ID NO: 9981 - DNA, 172 bp, Artificial Sequence; identical to SEQ ID NO: 9980
  Synthetic polynucleotide

SEQ ID NO: 9982 - DNA, 172 bp, Artificial Sequence
  Synthetic polynucleotide
atcatctcaccttgcctcctgcactttgaccagtagcccctgcaggtaagtaaacaagataagtaaacatcgtaagtaaacagactaagtaaacactataagtaaacaacttaagtaaacatgctaagtaaacagtataagtaaacaggcgcgccatgcttcatcagactct

SEQ ID NO: 9983 - DNA, 172 bp, Artificial Sequence; identical to SEQ ID NO: 9982
  Synthetic polynucleotide

SEQ ID NO: 9984 - DNA, 197 bp, Artificial Sequence
  Synthetic polynucleotide
atcatctcaccttgcctcctgtagctaatcgtctatcgcctgcaggtggtaattattaaccagatggtaattattaacctcgtggtaattattaaccgactggtaattattaaccctatggtaattattaaccacttggtaattattaacctgctggtaattattaaccgtaggcgcgccatgcttcatcagactct

SEQ ID NO: 9985 - DNA, 197 bp, Artificial Sequence; identical to SEQ ID NO: 9984
  Synthetic polynucleotide

SEQ ID NO: 9986 - DNA, 180 bp, Artificial Sequence
  Synthetic polynucleotide
atcatctcaccttgcctcctgttattcgagcgcgatgacctgcaggtatagggataaagatatagggataatcgtatagggataagactatagggataactatatagggataaacttatagggataatgctatagggataagtatatagggataaggcgcgccatgcttcatcagactct

SEQ ID NO: 9987 - DNA, 180 bp, Artificial Sequence; identical to SEQ ID NO: 9986
  Synthetic polynucleotide

SEQ ID NO: 9988 - DNA, 196 bp, Artificial Sequence
  Synthetic polynucleotide
atcatctcaccttgcctcctgccagagtagggatccatcctgcagggccactagagggcagagccactagagggctcggccactagagggcgacgccactagagggcctagccactagagggcactgccactagagggctgcgccactagagggcgtagccactagagggcggcgcgccatgcttcatcagactct

SEQ ID NO: 9989 - DNA, 196 bp, Artificial Sequence; identical to SEQ ID NO: 9988
  Synthetic polynucleotide

SEQ ID NO: 9990 - DNA, 190 bp, Artificial Sequence
  Synthetic polynucleotide
atcatctcaccttgcctcctgttaggtaaggccttcagcctgcagggggagctgtagtccagagggagctgtagtcctcggggagctgtagtccgacgggagctgtagtccctagggagctgtagtccactgggagctgtagtcctgcgggagctgtagtccgtaggcgcgccatgcttcatcagactct

SEQ ID NO: 9991 - DNA, 190 bp, Artificial Sequence; identical to SEQ ID NO: 9990
  Synthetic polynucleotide

SEQ ID NO: 9992 - DNA, 180 bp, Artificial Sequence
  Synthetic polynucleotide
atcatctcaccttgcctcctgtgcgtgcgtgtaatttacctgcaggcttaagtggttagacttaagtggtttcgcttaagtggttgaccttaagtggttctacttaagtggttactcttaagtggtttgccttaagtggttgtacttaagtggttggcgcgccatgcttcatcagactct

SEQ ID NO: 9993 - DNA, 180 bp, Artificial Sequence; identical to SEQ ID NO: 9992
  Synthetic polynucleotide

SEQ ID NO: 9994 - DNA, 185 bp, Artificial Sequence
  Synthetic polynucleotide
atcatctcaccttgcctcctgtttgtattcgacgggtacctgcaggttatcttatcttatctagattatcttatcttatcttcgttatcttatcttatctgacttatcttatcttatctctattatcttatcttatctactttatcttatcttatcttgcggcgcgccatgcttcatcagactct

SEQ ID NO: 9995 - DNA, 185 bp, Artificial Sequence; identical to SEQ ID NO: 9994
  Synthetic polynucleotide

SEQ ID NO: 9996 - DNA, 172 bp, Artificial Sequence
  Synthetic polynucleotide
atcatctcaccttgcctcctgtgaccgcattatccatgcctgcagggtttcgcgcgagagtttcgcgcgtcggtttcgcgcggacgtttcgcgcgctagtttcgcgcgactgtttcgcgcgtgcgtttcgcgcggtagtttcgcgcgggcgcgccatgcttcatcagactct

SEQ ID NO: 9997 - DNA, 172 bp, Artificial Sequence; identical to SEQ ID NO: 9996
  Synthetic polynucleotide

SEQ ID NO: 9998 - DNA, 200 bp, Artificial Sequence
  Synthetic polynucleotide
atcatctcaccttgcctcctgtctcaagcttcgatttccctgcaggtgccaactcccccattagtgctcgactccaagatgccaactcccccattagtgctcgactccatcgtgccaactcccccattagtgctcgactccagactgccaactcccccattagtgctcgactccaggcgcgccatgcttcatcagactct

SEQ ID NO: 9999 - DNA, 200 bp, Artificial Sequence; identical to SEQ ID NO: 9998
  Synthetic polynucleotide

SEQ ID NO: 10000 - DNA, 180 bp, Artificial Sequence
  Synthetic polynucleotide
atcatctcaccttgcctcctgttgctggcatcgaactccctgcaggactgagtcatcagaactgagtcatctcgactgagtcatcgacactgagtcatcctaactgagtcatcactactgagtcatctgcactgagtcatcgtaactgagtcatcggcgcgccatgcttcatcagactct

SEQ ID NO: 10001 - DNA, 180 bp, Artificial Sequence; identical to SEQ ID NO: 10000
  Synthetic polynucleotide

SEQ ID NO: 10002 - DNA, 164 bp, Artificial Sequence
  Synthetic polynucleotide
atcatctcaccttgcctcctgcgcgtatctcatagcaacctgcaggatcacgcgaagaatcacgcgatcgatcacgcgagacatcacgcgactaatcacgcgaactatcacgcgatgcatcacgcgagtaatcacgcgaggcgcgccatgcttcatcagactct

SEQ ID NO: 10003 - DNA, 164 bp, Artificial Sequence; identical to SEQ ID NO: 10002
  Synthetic polynucleotide

SEQ ID NO: 10004 - DNA, 172 bp, Artificial Sequence
  Synthetic polynucleotide
atcatctcaccttgcctcctgacggacaagtacatattcctgcagggtttcgcgccagagtttcgcgcctcggtttcgcgccgacgtttcgcgccctagtttcgcgccactgtttcgcgcctgcgtttcgcgccgtagtttcgcgccggcgcgccatgcttcatcagactct

SEQ ID NO: 10005 - DNA, 172 bp, Artificial Sequence; identical to SEQ ID NO: 10004
  Synthetic polynucleotide

SEQ ID NO: 10006 - DNA, 188 bp, Artificial Sequence
  Synthetic polynucleotide
atcatctcaccttgcctcctgtaacagcagccctggagcctgcaggtgctgagtcatgagatgctgagtcatgtcgtgctgagtcatggactgctgagtcatgctatgctgagtcatgacttgctgagtcatgtgctgctgagtcatggtatgctgagtcatgggcgcgccatgcttcatcagactct

SEQ ID NO: 10007 - DNA, 188 bp, Artificial Sequence; identical to SEQ ID NO: 10006
  Synthetic polynucleotide

SEQ ID NO: 10008 - DNA, 156 bp, Artificial Sequence
  Synthetic polynucleotide
atcatctcaccttgcctcctgtagatctgccaacagctcctgcagggaagcggtagagaagcggttcggaagcggtgacgaagcggtctagaagcggtactgaagcggttgcgaagcggtgtagaagcggtggcgcgccatgcttcatcagactct

SEQ ID NO: 10009 - DNA, 156 bp, Artificial Sequence; identical to SEQ ID NO: 10008
  Synthetic polynucleotide

SEQ ID NO: 10010 - DNA, 196 bp, Artificial Sequence
  Synthetic polynucleotide
atcatctcaccttgcctcctggcttacttatcctcgcacctgcaggtacaaggaagtaaagatacaaggaagtaatcgtacaaggaagtaagactacaaggaagtaactatacaaggaagtaaacttacaaggaagtaatgctacaaggaagtaagtatacaaggaagtaaggcgcgccatgcttcatcagactct

SEQ ID NO: 10011 - DNA, 196 bp, Artificial Sequence; identical to SEQ ID NO: 10010
  Synthetic polynucleotide

SEQ ID NO: 10012 - DNA, 180 bp, Artificial Sequence
  Synthetic polynucleotide
atcatctcaccttgcctcctgttcccagcgggattctgcctgcaggtgcagtgatttagatgcagtgattttcgtgcagtgatttgactgcagtgatttctatgcagtgatttacttgcagtgattttgctgcagtgatttgtatgcagtgatttggcgcgccatgcttcatcagactct

SEQ ID NO: 10013 - DNA, 180 bp, Artificial Sequence; identical to SEQ ID NO: 10012
  Synthetic polynucleotide

SEQ ID NO: 10014 - DNA, 180 bp, Artificial Sequence
  Synthetic polynucleotide
atcatctcaccttgcctcctgacgtgacacgctagtggcctgcaggtttaaaggtcaagatttaaaggtcatcgtttaaaggtcagactttaaaggtcactatttaaaggtcaacttttaaaggtcatgctttaaaggtcagtatttaaaggtcaggcgcgccatgcttcatcagactct

SEQ ID NO: 10015 - DNA, 180 bp, Artificial Sequence; identical to SEQ ID NO: 10014
  Synthetic polynucleotide

SEQ ID NO: 10016 - DNA, 185 bp, Artificial Sequence
  Synthetic polynucleotide
atcatctcaccttgcctcctggcggcggtacgttaatgcctgcaggaataacaggtgttcacagaaataacaggtgttcactcgaataacaggtgttcacgacaataacaggtgttcacctaaataacaggtgttcacactaataacaggtgttcactgcggcgcgccatgcttcatcagactct

SEQ ID NO: 10017 - DNA, 185 bp, Artificial Sequence; identical to SEQ ID NO: 10016
  Synthetic polynucleotide

SEQ ID NO: 10018 - DNA, 172 bp, Artificial Sequence
  Synthetic polynucleotide
atcatctcaccttgcctcctgcagcatggagatcactgcctgcaggtttgctgactagatttgctgacttcgtttgctgactgactttgctgactctatttgctgactacttttgctgacttgctttgctgactgtatttgctgactggcgcgccatgcttcatcagactct

SEQ ID NO: 10019 - DNA, 172 bp, Artificial Sequence; identical to SEQ ID NO: 10018
  Synthetic polynucleotide

SEQ ID NO: 10020 - DNA, 172 bp, Artificial Sequence
  Synthetic polynucleotide
atcatctcaccttgcctcctgagattcccgcttggcgtcctgcaggttgatacagtagattgatacagttcgttgatacagtgacttgatacagtctattgatacagtactttgatacagttgcttgatacagtgtattgatacagtggcgcgccatgcttcatcagactct

SEQ ID NO: 10021 - DNA, 172 bp, Artificial Sequence; identical to SEQ ID NO: 10020
  Synthetic polynucleotide

SEQ ID NO: 10022 - DNA, 197 bp, Artificial Sequence
  Synthetic polynucleotide
atcatctcaccttgcctcctgcaaattaccactaggcacctgcagggaggatgacgtcatcagagaggatgacgtcatctcggaggatgacgtcatcgacgaggatgacgtcatcctagaggatgacgtcatcactgaggatgacgtcatctgcgaggatgacgtcatcgtaggcgcgccatgcttcatcagactct

SEQ ID NO: 10023 - DNA, 197 bp, Artificial Sequence; identical to SEQ ID NO: 10022
  Synthetic polynucleotide

SEQ ID NO: 10024 - DNA, 191 bp, Artificial Sequence
  Synthetic polynucleotide
atcatctcaccttgcctcctgagtggtactcagtcgaacctgcaggatggaaaccgttattttagaatggaaaccgttatttttcgatggaaaccgttattttgacatggaaaccgttattttctaatggaaaccgttattttactatggaaaccgttatttttgcggcgcgccatgcttcatcagactct

SEQ ID NO: 10025 - DNA, 191 bp, Artificial Sequence; identical to SEQ ID NO: 10024
  Synthetic polynucleotide

SEQ ID NO: 10026 - DNA, 185 bp, Artificial Sequence
  Synthetic polynucleotide
atcatctcaccttgcctcctgttggcctattatggagacctgcaggaacaatattcattgttagaaacaatattcattgtttcgaacaatattcattgttgacaacaatattcattgttctaaacaatattcattgttactaacaatattcattgtttgcggcgcgccatgcttcatcagactct

SEQ ID NO: 10027 - DNA, 185 bp, Artificial Sequence; identical to SEQ ID NO: 10026
  Synthetic polynucleotide

SEQ ID NO: 10028 - DNA, 190 bp, Artificial Sequence
  Synthetic polynucleotide
atcatctcaccttgcctcctgacctggtacagctcaaccctgcaggaggttcaaaggtcaagaaggttcaaaggtcatcgaggttcaaaggtcagacaggttcaaaggtcactaaggttcaaaggtcaactaggttcaaaggtcatgcaggttcaaaggtcagtaggcgcgccatgcttcatcagactct

SEQ ID NO: 10029 - DNA, 190 bp, Artificial Sequence; identical to SEQ ID NO: 10028
  Synthetic polynucleotide

SEQ ID NO: 10030 - DNA, 164 bp, Artificial Sequence
  Synthetic polynucleotide
atcatctcaccttgcctcctggtgcgtgtaactttaaccctgcagggtaataaaaagagtaataaaatcggtaataaaagacgtaataaaactagtaataaaaactgtaataaaatgcgtaataaaagtagtaataaaaggcgcgccatgcttcatcagactct

SEQ ID NO: 10031 - DNA, 164 bp, Artificial Sequence; identical to SEQ ID NO: 10030
  Synthetic polynucleotide

SEQ ID NO: 10032 - DNA, 180 bp, Artificial Sequence
  Synthetic polynucleotide
atcatctcaccttgcctcctgcccaaatatcatgcaaccctgcaggccgcccacgcaagaccgcccacgcatcgccgcccacgcagacccgcccacgcactaccgcccacgcaactccgcccacgcatgcccgcccacgcagtaccgcccacgcaggcgcgccatgcttcatcagactct

SEQ ID NO: 10033 - DNA, 180 bp, Artificial Sequence; identical to SEQ ID NO: 10032
  Synthetic polynucleotide

SEQ ID NO: 10034 - DNA, 185 bp, Artificial Sequence
  Synthetic polynucleotide
atcatctcaccttgcctcctgcactcaccatttggatgcctgcaggacaatgtatcaatttgagaacaatgtatcaatttgtcgacaatgtatcaatttggacacaatgtatcaatttgctaacaatgtatcaatttgactacaatgtatcaatttgtgcggcgcgccatgcttcatcagactct

SEQ ID NO: 10035 - DNA, 185 bp, Artificial Sequence; identical to SEQ ID NO: 10034
  Synthetic polynucleotide

SEQ ID NO: 10036 - DNA, 180 bp, Artificial Sequence
  Synthetic polynucleotide
atcatctcaccttgcctcctgtactcatataacgatcgcctgcaggatatttacataagaatatttacatatcgatatttacatagacatatttacatactaatatttacataactatatttacatatgcatatttacatagtaatatttacataggcgcgccatgcttcatcagactct

SEQ ID NO: 10037 - DNA, 180 bp, Artificial Sequence; identical to SEQ ID NO: 10036
  Synthetic polynucleotide

SEQ ID NO: 10038 - DNA, 172 bp, Artificial Sequence
  Synthetic polynucleotide
atcatctcaccttgcctcctgtatacatagctaccgttcctgcaggcctaattaaaagacctaattaaatcgcctaattaaagaccctaattaaactacctaattaaaactcctaattaaatgccctaattaaagtacctaattaaaggcgcgccatgcttcatcagactct

SEQ ID NO: 10039 - DNA, 172 bp, Artificial Sequence; identical to SEQ ID NO: 10038
  Synthetic polynucleotide

SEQ ID NO: 10040 - DNA, 191 bp, Artificial Sequence
  Synthetic polynucleotide
atcatctcaccttgcctcctgctgtcctaagcagctttcctgcaggcataattaattaacgcgagacataattaattaacgcgtcgcataattaattaacgcggaccataattaattaacgcgctacataattaattaacgcgactcataattaattaacgcgtgcggcgcgccatgcttcatcagactct

SEQ ID NO: 10041 - DNA, 191 bp, Artificial Sequence; identical to SEQ ID NO: 10040
  Synthetic polynucleotide

SEQ ID NO: 10042 - DNA, 156 bp, Artificial Sequence
  Synthetic polynucleotide
atcatctcaccttgcctcctggtgcagtcctactaggacctgcaggtagaaatgagatagaaatgtcgtagaaatggactagaaatgctatagaaatgacttagaaatgtgctagaaatggtatagaaatgggcgcgccatgcttcatcagactct

SEQ ID NO: 10043 - DNA, 156 bp, Artificial Sequence; identical to SEQ ID NO: 10042
  Synthetic polynucleotide

SEQ ID NO: 10044 - DNA, 164 bp, Artificial Sequence
  Synthetic polynucleotide
atcatctcaccttgcctcctgcaagacacgcgagcgaacctgcaggaaaggtcaaagaaaaggtcaatcgaaaggtcaagacaaaggtcaactaaaaggtcaaactaaaggtcaatgcaaaggtcaagtaaaaggtcaaggcgcgccatgcttcatcagactct

SEQ ID NO: 10045 - DNA, 164 bp, Artificial Sequence; identical to SEQ ID NO: 10044
  Synthetic polynucleotide

SEQ ID NO: 10046 - DNA, 172 bp, Artificial Sequence
  Synthetic polynucleotide
atcatctcaccttgcctcctgctaaatgactcgtataccctgcaggtcgattaataagatcgattaatatcgtcgattaatagactcgattaatactatcgattaataacttcgattaatatgctcgattaatagtatcgattaataggcgcgccatgcttcatcagactct

SEQ ID NO: 10047 - DNA, 172 bp, Artificial Sequence; identical to SEQ ID NO: 10046
  Synthetic polynucleotide

SEQ ID NO: 10048 - DNA, 172 bp, Artificial Sequence
  Synthetic polynucleotide
atcatctcaccttgcctcctgagaggattcagccctagcctgcagggcgcacgcgcagagcgcacgcgctcggcgcacgcgcgacgcgcacgcgcctagcgcacgcgcactgcgcacgcgctgcgcgcacgcgcgtagcgcacgcgcggcgcgccatgcttcatcagactct

SEQ ID NO: 10049 - DNA, 172 bp, Artificial Sequence; identical to SEQ ID NO: 10048
  Synthetic polynucleotide

SEQ ID NO: 10050 - DNA, 186 bp, Artificial Sequence
  Synthetic polynucleotide
atcatctcaccttgcctcctgacagtaaatgccgagcccctgcaggacatgcccgggcatgtccggagaacatgcccgggcatgtccggtcgacatgcccgggcatgtccgggacacatgcccgggcatgtccggctaacatgcccgggcatgtccggactggcgcgccatgcttcatcagactct

SEQ ID NO: 10051 - DNA, 186 bp, Artificial Sequence; identical to SEQ ID NO: 10050
  Synthetic polynucleotide

SEQ ID NO: 10052 - DNA, 191 bp, Artificial Sequence
  Synthetic polynucleotide
atcatctcaccttgcctcctgacatgtggctcagaggccctgcaggtaaactgataagaagatagataaactgataagaagattcgtaaactgataagaagatgactaaactgataagaagatctataaactgataagaagatacttaaactgataagaagattgcggcgcgccatgcttcatcagactct

SEQ ID NO: 10053 - DNA, 191 bp, Artificial Sequence; identical to SEQ ID NO: 10052
  Synthetic polynucleotide

SEQ ID NO: 10054 - DNA, 197 bp, Artificial Sequence
  Synthetic polynucleotide
atcatctcaccttgcctcctggcgccaacgtgagatagcctgcaggtccgttgctatgcggagatccgttgctatgcggtcgtccgttgctatgcgggactccgttgctatgcggctatccgttgctatgcggacttccgttgctatgcggtgctccgttgctatgcgggtaggcgcgccatgcttcatcagactct

SEQ ID NO: 10055 - DNA, 197 bp, Artificial Sequence; identical to SEQ ID NO: 10054
  Synthetic polynucleotide

SEQ ID NO: 10056 - DNA, 164 bp, Artificial Sequence
  Synthetic polynucleotide
atcatctcaccttgcctcctggtttctggctcctctaacctgcaggaaaggtcacagaaaaggtcactcgaaaggtcacgacaaaggtcacctaaaaggtcacactaaaggtcactgcaaaggtcacgtaaaaggtcacggcgcgccatgcttcatcagactct

SEQ ID NO: 10057 - DNA, 164 bp, Artificial Sequence; identical to SEQ ID NO: 10056
  Synthetic polynucleotide

SEQ ID NO: 10058 - DNA, 180 bp, Artificial Sequence
  Synthetic polynucleotide
atcatctcaccttgcctcctgccgtcggctatgtaatacctgcaggccgcccacgccagaccgcccacgcctcgccgcccacgccgacccgcccacgccctaccgcccacgccactccgcccacgcctgcccgcccacgccgtaccgcccacgccggcgcgccatgcttcatcagactct

SEQ ID NO: 10059 - DNA, 180 bp, Artificial Sequence; identical to SEQ ID NO: 10058
  Synthetic polynucleotide

SEQ ID NO: 10060 - DNA, 197 bp, Artificial Sequence
  Synthetic polynucleotide
atcatctcaccttgcctcctgcctatgacaggaaatatcctgcagggagcaacaggtggttagagagcaacaggtggtttcggagcaacaggtggttgacgagcaacaggtggttctagagcaacaggtggttactgagcaacaggtggtttgcgagcaacaggtggttgtaggcgcgccatgcttcatcagactct

SEQ ID NO: 10061 - DNA, 197 bp, Artificial Sequence; identical to SEQ ID NO: 10060
  Synthetic polynucleotide

SEQ ID NO: 10062 - DNA, 180 bp, Artificial Sequence
  Synthetic polynucleotide
atcatctcaccttgcctcctgttcgtccagcgtttatacctgcaggatattaattaaagaatattaattaatcgatattaattaagacatattaattaactaatattaattaaactatattaattaatgcatattaattaagtaatattaattaaggcgcgccatgcttcatcagactct

SEQ ID NO: 10063 - DNA, 180 bp, Artificial Sequence; identical to SEQ ID NO: 10062
  Synthetic polynucleotide

SEQ ID NO: 10064 - DNA, 172 bp, Artificial Sequence
  Synthetic polynucleotide
atcatctcaccttgcctcctggggtacttcaatataagcctgcaggagggggcgggagaagggggcgggtcgagggggcggggacagggggcgggctaagggggcgggactagggggcgggtgcagggggcggggtaagggggcgggggcgcgccatgcttcatcagactct

SEQ ID NO: 10065 - DNA, 172 bp, Artificial Sequence; identical to SEQ ID NO: 10064
  Synthetic polynucleotide

SEQ ID NO: 10066 - DNA, 164 bp, Artificial Sequence
  Synthetic polynucleotide
atcatctcaccttgcctcctgtgcgtaccttccggtgacctgcaggactgttactagaactgttacttcgactgttactgacactgttactctaactgttactactactgttacttgcactgttactgtaactgttactggcgcgccatgcttcatcagactct

SEQ ID NO: 10067 - DNA, 164 bp, Artificial Sequence; identical to SEQ ID NO: 10066
  Synthetic polynucleotide

SEQ ID NO: 10068 - DNA, 188 bp, Artificial Sequence
  Synthetic polynucleotide
atcatctcaccttgcctcctgtggtggctccattccaacctgcaggagataaaagggaagaagataaaagggatcgagataaaagggagacagataaaagggactaagataaaagggaactagataaaagggatgcagataaaagggagtaagataaaagggaggcgcgccatgcttcatcagactct

SEQ ID NO: 10069 - DNA, 188 bp, Artificial Sequence; identical to SEQ ID NO: 10068
  Synthetic polynucleotide

SEQ ID NO: 10070 - DNA, 197 bp, Artificial Sequence
  Synthetic polynucleotide
atcatctcaccttgcctcctgaatgtccgcaaatgctacctgcaggccgaagcaggtggcgaagagaccgaagcaggtggcgaagtcgccgaagcaggtggcgaaggacccgaagcaggtggcgaagctaccgaagcaggtggcgaagactccgaagcaggtggcgaagtgcggcgcgccatgcttcatcagactct

SEQ ID NO: 10071 - DNA, 197 bp, Artificial Sequence; identical to SEQ ID NO: 10070
  Synthetic polynucleotide

SEQ ID NO: 10072 - DNA, 196 bp, Artificial Sequence
  Synthetic polynucleotide
atcatctcaccttgcctcctgagtctatcattccggatcctgcagggtcattttggccgagagtcattttggccgtcggtcattttggccggacgtcattttggccgctagtcattttggccgactgtcattttggccgtgcgtcattttggccggtagtcattttggccgggcgcgccatgcttcatcagactct

SEQ ID NO: 10073 - DNA, 196 bp, Artificial Sequence; identical to SEQ ID NO: 10072
  Synthetic polynucleotide

SEQ ID NO: 10074 - DNA, 172 bp, Artificial Sequence
  Synthetic polynucleotide
atcatctcaccttgcctcctggagcttgcaatccttggcctgcagggaccggaagtagagaccggaagttcggaccggaagtgacgaccggaagtctagaccggaagtactgaccggaagttgcgaccggaagtgtagaccggaagtggcgcgccatgcttcatcagactct

SEQ ID NO: 10075 - DNA, 172 bp, Artificial Sequence; identical to SEQ ID NO: 10074
  Synthetic polynucleotide

SEQ ID NO: 10076 - DNA, 180 bp, Artificial Sequence
  Synthetic polynucleotide
atcatctcaccttgcctcctgtctactcccaaggtgctcctgcaggtgatgacgcaaagatgatgacgcaatcgtgatgacgcaagactgatgacgcaactatgatgacgcaaacttgatgacgcaatgctgatgacgcaagtatgatgacgcaaggcgcgccatgcttcatcagactct

SEQ ID NO: 10077 - DNA, 180 bp, Artificial Sequence; identical to SEQ ID NO: 10076
  Synthetic polynucleotide

SEQ ID NO: 10078 - DNA, 185 bp, Artificial Sequence
  Synthetic polynucleotide
atcatctcaccttgcctcctgggttagaacatatcggacctgcaggtttttgcacacggcccagatttttgcacacggccctcgtttttgcacacggcccgactttttgcacacggcccctatttttgcacacggcccacttttttgcacacggccctgcggcgcgccatgcttcatcagactct

SEQ ID NO: 10079 - DNA, 185 bp, Artificial Sequence; identical to SEQ ID NO: 10078
  Synthetic polynucleotide

SEQ ID NO: 10080 - DNA, 185 bp, Artificial Sequence
  Synthetic polynucleotide
atcatctcaccttgcctcctgctacactgaagccgctccctgcaggttttgctactgtaaaaagattttgctactgtaaaatcgttttgctactgtaaaagacttttgctactgtaaaactattttgctactgtaaaaactttttgctactgtaaaatgcggcgcgccatgcttcatcagactct

SEQ ID NO: 10081 - DNA, 185 bp, Artificial Sequence; identical to SEQ ID NO: 10080
  Synthetic polynucleotide

SEQ ID NO: 10082 - DNA, 172 bp, Artificial Sequence
  Synthetic polynucleotide
atcatctcaccttgcctcctggcctcggatttaacgggcctgcaggctgtcactcaagactgtcactcatcgctgtcactcagacctgtcactcactactgtcactcaactctgtcactcatgcctgtcactcagtactgtcactcaggcgcgccatgcttcatcagactct

SEQ ID NO: 10083 - DNA, 172 bp, Artificial Sequence; identical to SEQ ID NO: 10082
  Synthetic polynucleotide

SEQ ID NO: 10084 - DNA, 156 bp, Artificial Sequence
  Synthetic polynucleotide
atcatctcaccttgcctcctgattcaccttaccgtctacctgcaggtttcccgcagatttcccgctcgtttcccgcgactttcccgcctatttcccgcacttttcccgctgctttcccgcgtatttcccgcggcgcgccatgcttcatcagactct

SEQ ID NO: 10085 - DNA, 156 bp, Artificial Sequence; identical to SEQ ID NO: 10084
  Synthetic polynucleotide

SEQ ID NO: 10086 - DNA, 180 bp, Artificial Sequence
  Synthetic polynucleotide
atcatctcaccttgcctcctggtattacggcaatgaatcctgcaggcaaagtaaacaagacaaagtaaacatcgcaaagtaaacagaccaaagtaaacactacaaagtaaacaactcaaagtaaacatgccaaagtaaacagtacaaagtaaacaggcgcgccatgcttcatcagactct

SEQ ID NO: 10087 - DNA, 180 bp, Artificial Sequence; identical to SEQ ID NO: 10086
  Synthetic polynucleotide

SEQ ID NO: 10088 - DNA, 197 bp, Artificial Sequence
  Synthetic polynucleotide
atcatctcaccttgcctcctgaactaagccaccttccgcctgcaggaccgcctgaggcggtagaaccgcctgaggcggttcgaccgcctgaggcggtgacaccgcctgaggcggtctaaccgcctgaggcggtactaccgcctgaggcggttgcaccgcctgaggcggtgtaggcgcgccatgcttcatcagactct

SEQ ID NO: 10089 - DNA, 197 bp, Artificial Sequence; identical to SEQ ID NO: 10088
  Synthetic polynucleotide

SEQ ID NO: 10090 - DNA, 196 bp, Artificial Sequence
  Synthetic polynucleotide
atcatctcaccttgcctcctgaaatcttaggatgccaccctgcagggggggcgggaaagagagggggcgggaaagtcggggggcgggaaaggacgggggcgggaaagctagggggcgggaaagactgggggcgggaaagtgcgggggcgggaaaggtagggggcgggaaagggcgcgccatgcttcatcagactct

SEQ ID NO: 10091 - DNA, 196 bp, Artificial Sequence; identical to SEQ ID NO: 10090
  Synthetic polynucleotide

SEQ ID NO: 10092 - DNA, 197 bp, Artificial Sequence
  Synthetic polynucleotide
atcatctcaccttgcctcctgtctcattaacgtgtgaacctgcaggataatccgggaccacagaataatccgggaccactcgataatccgggaccacgacataatccgggaccacctaataatccgggaccacactataatccgggaccactgcataatccgggaccacgtaggcgcgccatgcttcatcagactct

SEQ ID NO: 10093 - DNA, 197 bp, Artificial Sequence; identical to SEQ ID NO: 10092
  Synthetic polynucleotide

SEQ ID NO: 10094 - DNA, 156 bp, Artificial Sequence
  Synthetic polynucleotide
atcatctcaccttgcctcctggatgttcacctgcattgcctgcaggcagataagagacagataagtcgcagataaggaccagataagctacagataagactcagataagtgccagataaggtacagataagggcgcgccatgcttcatcagactct

SEQ ID NO: 10095 - DNA, 156 bp, Artificial Sequence; identical to SEQ ID NO: 10094
  Synthetic polynucleotide

SEQ ID NO: 10096 - DNA, 172 bp, Artificial Sequence
  Synthetic polynucleotide
atcatctcaccttgcctcctgtgggacattgcatgctccctgcaggttgatggatgagattgatggatgtcgttgatggatggacttgatggatgctattgatggatgactttgatggatgtgcttgatggatggtattgatggatgggcgcgccatgcttcatcagactct

SEQ ID NO: 10097 - DNA, 172 bp, Artificial Sequence; identical to SEQ ID NO: 10096
  Synthetic polynucleotide

SEQ ID NO: 10098 - DNA, 196 bp, Artificial Sequence
  Synthetic polynucleotide
atcatctcaccttgcctcctgtcttctatatggcattgcctgcaggattttcacaccttagaattttcacacctttcgattttcacaccttgacattttcacaccttctaattttcacaccttactattttcacacctttgcattttcacaccttgtaattttcacaccttggcgcgccatgcttcatcagactct

SEQ ID NO: 10099 - DNA, 196 bp, Artificial Sequence; identical to SEQ ID NO: 10098
  Synthetic polynucleotide

SEQ ID NO: 10100 - DNA, 156 bp, Artificial Sequence
  Synthetic polynucleotide
atcatctcaccttgcctcctgtgggtgctccacaatcccctgcaggtatttccaagatatttccatcgtatttccagactatttccactatatttccaacttatttccatgctatttccagtatatttccaggcgcgccatgcttcatcagactct

SEQ ID NO: 10101 - DNA, 156 bp, Artificial Sequence; identical to SEQ ID NO: 10100
  Synthetic polynucleotide

SEQ ID NO: 10102 - DNA, 188 bp, Artificial Sequence
  Synthetic polynucleotide
atcatctcaccttgcctcctgctaagaacaactgggcgcctgcaggtctattgtttacagatctattgtttactcgtctattgtttacgactctattgtttacctatctattgtttacacttctattgtttactgctctattgtttacgtatctattgtttacggcgcgccatgcttcatcagactct

SEQ ID NO: 10103 - DNA, 188 bp, Artificial Sequence; identical to SEQ ID NO: 10102
  Synthetic polynucleotide

SEQ ID NO: 10104 - DNA, 190 bp, Artificial Sequence
  Synthetic polynucleotide
atcatctcaccttgcctcctgatttctgttcggacctgcctgcaggtttcctagaaagcaagatttcctagaaagcatcgtttcctagaaagcagactttcctagaaagcactatttcctagaaagcaacttttcctagaaagcatgctttcctagaaagcagtaggcgcgccatgcttcatcagactct

SEQ ID NO: 10105 - DNA, 190 bp, Artificial Sequence; identical to SEQ ID NO: 10104
  Synthetic polynucleotide

SEQ ID NO: 10106 - DNA, 164 bp, Artificial Sequence
  Synthetic polynucleotide
atcatctcaccttgcctcctggaagccaggtaatgaatcctgcaggaccaattagagaaccaattagtcgaccaattaggacaccaattagctaaccaattagactaccaattagtgcaccaattaggtaaccaattagggcgcgccatgcttcatcagactct

SEQ ID NO: 10107 - DNA, 164 bp, Artificial Sequence; identical to SEQ ID NO: 10106
  Synthetic polynucleotide

SEQ ID NO: 10108 - DNA, 197 bp, Artificial Sequence
  Synthetic polynucleotide
atcatctcaccttgcctcctggttcggccttatgggctcctgcaggaccggatgtacttccggtagaaccggatgtacttccggttcgaccggatgtacttccggtgacaccggatgtacttccggtctaaccggatgtacttccggtactaccggatgtacttccggttgcggcgcgccatgcttcatcagactct

SEQ ID NO: 10109 - DNA, 197 bp, Artificial Sequence; identical to SEQ ID NO: 10108
  Synthetic polynucleotide

SEQ ID NO: 10110 - DNA, 180 bp, Artificial Sequence
  Synthetic polynucleotide
atcatctcaccttgcctcctggacgcttggagtgtgaccctgcaggcgccatatggtagacgccatatggttcgcgccatatggtgaccgccatatggtctacgccatatggtactcgccatatggttgccgccatatggtgtacgccatatggtggcgcgccatgcttcatcagactct

SEQ ID NO: 10111 - DNA, 180 bp, Artificial Sequence; identical to SEQ ID NO: 10110
  Synthetic polynucleotide

SEQ ID NO: 10112 - DNA, 197 bp, Artificial Sequence
  Synthetic polynucleotide
atcatctcaccttgcctcctgtgatctcaaacttcggtcctgcaggttaattgccaattagagattaattgccaattagtcgttaattgccaattaggacttaattgccaattagctattaattgccaattagactttaattgccaattagtgcttaattgccaattaggtaggcgcgccatgcttcatcagactct

SEQ ID NO: 10113 - DNA, 197 bp, Artificial Sequence; identical to SEQ ID NO: 10112
  Synthetic polynucleotide

SEQ ID NO: 10114 - DNA, 164 bp, Artificial Sequence
  Synthetic polynucleotide
atcatctcaccttgcctcctgagatcagataacctctacctgcaggtatgcaaatagatatgcaaattcgtatgcaaatgactatgcaaatctatatgcaaatacttatgcaaattgctatgcaaatgtatatgcaaatggcgcgccatgcttcatcagactct

SEQ ID NO: 10115 - DNA, 164 bp, Artificial Sequence; identical to SEQ ID NO: 10114
  Synthetic polynucleotide

SEQ ID NO: 10116 - DNA, 172 bp, Artificial Sequence
  Synthetic polynucleotide
atcatctcaccttgcctcctggttggcgaataccatgtcctgcaggcctttgatctagacctttgatcttcgcctttgatctgaccctttgatctctacctttgatctactcctttgatcttgccctttgatctgtacctttgatctggcgcgccatgcttcatcagactct

SEQ ID NO: 10117 - DNA, 172 bp, Artificial Sequence; identical to SEQ ID NO: 10116
  Synthetic polynucleotide

SEQ ID NO: 10118 - DNA, 172 bp, Artificial Sequence
  Synthetic polynucleotide
atcatctcaccttgcctcctgggatcagcacttgcactcctgcaggagacaagtccagaagacaagtcctcgagacaagtccgacagacaagtccctaagacaagtccactagacaagtcctgcagacaagtccgtaagacaagtccggcgcgccatgcttcatcagactct

SEQ ID NO: 10119 - DNA, 172 bp, Artificial Sequence; identical to SEQ ID NO: 10118
  Synthetic polynucleotide

SEQ ID NO: 10120 - DNA, 197 bp, Artificial Sequence
  Synthetic polynucleotide
atcatctcaccttgcctcctgcacagtctgaacatacgcctgcaggaacaatgcaattgttagaaacaatgcaattgtttcgaacaatgcaattgttgacaacaatgcaattgttctaaacaatgcaattgttactaacaatgcaattgtttgcaacaatgcaattgttgtaggcgcgccatgcttcatcagactct

SEQ ID NO: 10121 - DNA, 197 bp, Artificial Sequence; identical to SEQ ID NO: 10120
  Synthetic polynucleotide

SEQ ID NO: 10122 - DNA, 180 bp, Artificial Sequence
  Synthetic polynucleotide
atcatctcaccttgcctcctggcgacttacaatatctacctgcagggtgcacgtgagagagtgcacgtgagtcggtgcacgtgaggacgtgcacgtgagctagtgcacgtgagactgtgcacgtgagtgcgtgcacgtgaggtagtgcacgtgagggcgcgccatgcttcatcagactct

SEQ ID NO: 10123 - DNA, 180 bp, Artificial Sequence; identical to SEQ ID NO: 10122
  Synthetic polynucleotide

SEQ ID NO: 10124 - DNA, 185 bp, Artificial Sequence
  Synthetic polynucleotide
atcatctcaccttgcctcctggctcagttagggtttagcctgcaggtagagggaagttgcctagatagagggaagttgccttcgtagagggaagttgcctgactagagggaagttgcctctatagagggaagttgcctacttagagggaagttgccttgcggcgcgccatgcttcatcagactct

SEQ ID NO: 10125 - DNA, 185 bp, Artificial Sequence; identical to SEQ ID NO: 10124
  Synthetic polynucleotide

SEQ ID NO: 10126 - DNA, 196 bp, Artificial Sequence
  Synthetic polynucleotide
atcatctcaccttgcctcctgtggacacttatacggcgcctgcaggtaaacaaaaacaaagataaacaaaaacaatcgtaaacaaaaacaagactaaacaaaaacaactataaacaaaaacaaacttaaacaaaaacaatgctaaacaaaaacaagtataaacaaaaacaaggcgcgccatgcttcatcagactct

SEQ ID NO: 10127 - DNA, 196 bp, Artificial Sequence; identical to SEQ ID NO: 10126
  Synthetic polynucleotide

SEQ ID NO: 10128 - DNA, 185 bp, Artificial Sequence
  Synthetic polynucleotide
atcatctcaccttgcctcctggcaagatcgtttaactgcctgcaggttccattaattactacagattccattaattactactcgttccattaattactacgacttccattaattactacctattccattaattactacactttccattaattactactgcggcgcgccatgcttcatcagactct

SEQ ID NO: 10129 - DNA, 185 bp, Artificial Sequence; identical to SEQ ID NO: 10128
  Synthetic polynucleotide

SEQ ID NO: 10130 - DNA, 197 bp, Artificial Sequence
  Synthetic polynucleotide
atcatctcaccttgcctcctgtcaactgcaattcttgtcctgcaggcattttggcgccaaaattagacattttggcgccaaaatttcgcattttggcgccaaaattgaccattttggcgccaaaattctacattttggcgccaaaattactcattttggcgccaaaatttgcggcgcgccatgcttcatcagactct

SEQ ID NO: 10131 - DNA, 197 bp, Artificial Sequence; identical to SEQ ID NO: 10130
  Synthetic polynucleotide

SEQ ID NO: 10132 - DNA, 196 bp, Artificial Sequence
  Synthetic polynucleotide
atcatctcaccttgcctcctgcttcagagaaagctcgacctgcaggtattaatgagctgagatattaatgagctgtcgtattaatgagctggactattaatgagctgctatattaatgagctgacttattaatgagctgtgctattaatgagctggtatattaatgagctgggcgcgccatgcttcatcagactct

SEQ ID NO: 10133 - DNA, 196 bp, Artificial Sequence; identical to SEQ ID NO: 10132
  Synthetic polynucleotide

SEQ ID NO: 10134 - DNA, 156 bp, Artificial Sequence
  Synthetic polynucleotide
atcatctcaccttgcctcctgttggcatcctgtacgtacctgcaggccacctgcagaccacctgctcgccacctgcgacccacctgcctaccacctgcactccacctgctgcccacctgcgtaccacctgcggcgcgccatgcttcatcagactct

SEQ ID NO: 10135 - DNA, 156 bp, Artificial Sequence; identical to SEQ ID NO: 10134
  Synthetic polynucleotide

SEQ ID NO: 10136 - DNA, 180 bp, Artificial Sequence
  Synthetic polynucleotide
atcatctcaccttgcctcctggtagggtttccgtgcaacctgcaggctaagtaaacaagactaagtaaacatcgctaagtaaacagacctaagtaaacactactaagtaaacaactctaagtaaacatgcctaagtaaacagtactaagtaaacaggcgcgccatgcttcatcagactct

SEQ ID NO: 10137 - DNA, 180 bp, Artificial Sequence; identical to SEQ ID NO: 10136
  Synthetic polynucleotide

SEQ ID NO: 10138 - DNA, 172 bp, Artificial Sequence
  Synthetic polynucleotide
atcatctcaccttgcctcctgctaatggaatagcactccctgcagggcgtgggagaagagcgtgggagatcggcgtgggagagacgcgtgggagactagcgtgggagaactgcgtgggagatgcgcgtgggagagtagcgtgggagaggcgcgccatgcttcatcagactct

SEQ ID NO: 10139 - DNA, 172 bp, Artificial Sequence; identical to SEQ ID NO: 10138
  Synthetic polynucleotide

SEQ ID NO: 10140 - DNA, 172 bp, Artificial Sequence
  Synthetic polynucleotide
atcatctcaccttgcctcctgcagaccgctgagttgtccctgcaggttcacaccttagattcacacctttcgttcacaccttgacttcacaccttctattcacaccttactttcacacctttgcttcacaccttgtattcacaccttggcgcgccatgcttcatcagactct

SEQ ID NO: 10141 - DNA, 172 bp, Artificial Sequence; identical to SEQ ID NO: 10140
  Synthetic polynucleotide

SEQ ID NO: 10142 - DNA, 172 bp, Artificial Sequence
  Synthetic polynucleotide
atcatctcaccttgcctcctgtcgatcgcctaccaactcctgcaggcctaattaccagacctaattacctcgcctaattaccgaccctaattaccctacctaattaccactcctaattacctgccctaattaccgtacctaattaccggcgcgccatgcttcatcagactct

SEQ ID NO: 10143 - DNA, 172 bp, Artificial Sequence; identical to SEQ ID NO: 10142
  Synthetic polynucleotide

SEQ ID NO: 10144 - DNA, 200 bp, Artificial Sequence
  Synthetic polynucleotide
atcatctcaccttgcctcctggtgggaaacagctccgacctgcaggcctgaccccaatgacccgaagacctgaccccaatgacccgatcgcctgaccccaatgacccgagaccctgaccccaatgacccgactacctgaccccaatgacccgaactcctgaccccaatgacccgaggcgcgccatgcttcatcagactct

SEQ ID NO: 10145 - DNA, 200 bp, Artificial Sequence; identical to SEQ ID NO: 10144
  Synthetic polynucleotide

SEQ ID NO: 10146 - DNA, 188 bp, Artificial Sequence
  Synthetic polynucleotide
atcatctcaccttgcctcctggtgggttctccacacagcctgcaggcaacaggtggtgagacaacaggtggtgtcgcaacaggtggtggaccaacaggtggtgctacaacaggtggtgactcaacaggtggtgtgccaacaggtggtggtacaacaggtggtgggcgcgccatgcttcatcagactct

SEQ ID NO: 10147 - DNA, 188 bp, Artificial Sequence; identical to SEQ ID NO: 10146
  Synthetic polynucleotide

SEQ ID NO: 10148 - DNA, 172 bp, Artificial Sequence
  Synthetic polynucleotide
atcatctcaccttgcctcctgtgagaagttaaatagcccctgcaggagtgaaagtgagaagtgaaagtgtcgagtgaaagtggacagtgaaagtgctaagtgaaagtgactagtgaaagtgtgcagtgaaagtggtaagtgaaagtgggcgcgccatgcttcatcagactct

SEQ ID NO: 10149 - DNA, 172 bp, Artificial Sequence; identical to SEQ ID NO: 10148
  Synthetic polynucleotide

SEQ ID NO: 10150 - DNA, 191 bp, Artificial Sequence
  Synthetic polynucleotide
atcatctcaccttgcctcctgagtcacggtgaaacgcgcctgcagggtccaaaaatggagatcagagtccaaaaatggagatctcggtccaaaaatggagatcgacgtccaaaaatggagatcctagtccaaaaatggagatcactgtccaaaaatggagatctgcggcgcgccatgcttcatcagactct

SEQ ID NO: 10151 - DNA, 191 bp, Artificial Sequence; identical to SEQ ID NO: 10150
  Synthetic polynucleotide

SEQ ID NO: 10152 - DNA, 164 bp, Artificial Sequence
  Synthetic polynucleotide
atcatctcaccttgcctcctggtcaacctgcaaggcttcctgcaggaccggaaatagaaccggaaattcgaccggaaatgacaccggaaatctaaccggaaatactaccggaaattgcaccggaaatgtaaccggaaatggcgcgccatgcttcatcagactct

SEQ ID NO: 10153 - DNA, 164 bp, Artificial Sequence; identical to SEQ ID NO: 10152
  Synthetic polynucleotide

SEQ ID NO: 10154 - DNA, 132 bp, Artificial Sequence
  Synthetic polynucleotide
atcatctcaccttgcctcctgggcaaatccctatcattcctgcaggtaacaagataacatcgtaacagactaacactataacaacttaacatgctaacagtataacaggcgcgccatgcttcatcagactct

SEQ ID NO: 10155 - DNA, 132 bp, Artificial Sequence; identical to SEQ ID NO: 10154
  Synthetic polynucleotide

SEQ ID NO: 10156 - DNA, 191 bp, Artificial Sequence
  Synthetic polynucleotide
atcatctcaccttgcctcctgaagaatatccacgttctcctgcaggaaaaagaggaagtgaaaagaaaaaagaggaagtgaaatcgaaaaagaggaagtgaaagacaaaaagaggaagtgaaactaaaaaagaggaagtgaaaactaaaaagaggaagtgaaatgcggcgcgccatgcttcatcagactct

SEQ ID NO: 10157 - DNA, 191 bp, Artificial Sequence; identical to SEQ ID NO: 10156
  Synthetic polynucleotide

SEQ ID NO: 10158 - DNA, 196 bp, Artificial Sequence
  Synthetic polynucleotide
atcatctcaccttgcctcctgaggtctccttgattgttcctgcaggctaaaatgactcagcaattatgagactaaaatgactcagcaattatgtcgctaaaatgactcagcaattatggacctaaaatgactcagcaattatgctactaaaatgactcagcaattatgactggcgcgccatgcttcatcagactct

SEQ ID NO: 10159 - DNA, 196 bp, Artificial Sequence; identical to SEQ ID NO: 10158
  Synthetic polynucleotide

SEQ ID NO: 10160 - DNA, 172 bp, Artificial Sequence
  Synthetic polynucleotide
atcatctcaccttgcctcctggacttgaagcgtaggtccctgcaggagcgcgcgcgagaagcgcgcgcgtcgagcgcgcgcggacagcgcgcgcgctaagcgcgcgcgactagcgcgcgcgtgcagcgcgcgcggtaagcgcgcgcgggcgcgccatgcttcatcagactct

SEQ ID NO: 10161 - DNA, 172 bp, Artificial Sequence; identical to SEQ ID NO: 10160
  Synthetic polynucleotide

SEQ ID NO: 10162 - DNA, 172 bp, Artificial Sequence
  Synthetic polynucleotide
atcatctcaccttgcctcctgtttagtgaaatgtggtgcctgcaggttcacacctcagattcacacctctcgttcacacctcgacttcacacctcctattcacacctcactttcacacctctgcttcacacctcgtattcacacctcggcgcgccatgcttcatcagactct

SEQ ID NO: 10163 - DNA, 172 bp, Artificial Sequence; identical to SEQ ID NO: 10162
  Synthetic polynucleotide

SEQ ID NO: 10164 - DNA, 156 bp, Artificial Sequence
  Synthetic polynucleotide
atcatctcaccttgcctcctggccctagcataacggcacctgcaggactcatgcagaactcatgctcgactcatgcgacactcatgcctaactcatgcactactcatgctgcactcatgcgtaactcatgcggcgcgccatgcttcatcagactct

SEQ ID NO: 10165 - DNA, 156 bp, Artificial Sequence; identical to SEQ ID NO: 10164
  Synthetic polynucleotide

SEQ ID NO: 10166 - DNA, 190 bp, Artificial Sequence
  Synthetic polynucleotide
atcatctcaccttgcctcctggacatgccgacatgttccctgcaggtaattggtcaattaagataattggtcaattatcgtaattggtcaattagactaattggtcaattactataattggtcaattaacttaattggtcaattatgctaattggtcaattagtaggcgcgccatgcttcatcagactct

SEQ ID NO: 10167 - DNA, 190 bp, Artificial Sequence; identical to SEQ ID NO: 10166
  Synthetic polynucleotide

SEQ ID NO: 10168 - DNA, 196 bp, Artificial Sequence
  Synthetic polynucleotide
atcatctcaccttgcctcctgtttgtgctggcggcacacctgcaggcgtcagctgtcgtagacgtcagctgtcgttcgcgtcagctgtcgtgaccgtcagctgtcgtctacgtcagctgtcgtactcgtcagctgtcgttgccgtcagctgtcgtgtacgtcagctgtcgtggcgcgccatgcttcatcagactct

SEQ ID NO: 10169 - DNA, 196 bp, Artificial Sequence; identical to SEQ ID NO: 10168
  Synthetic polynucleotide

SEQ ID NO: 10170 - DNA, 156 bp, Artificial Sequence
  Synthetic polynucleotide
atcatctcaccttgcctcctgttcgggaatcgccaatgcctgcaggccacctggagaccacctggtcgccacctgggacccacctggctaccacctggactccacctggtgcccacctgggtaccacctggggcgcgccatgcttcatcagactct

SEQ ID NO: 10171 - DNA, 156 bp, Artificial Sequence; identical to SEQ ID NO: 10170
  Synthetic polynucleotide

SEQ ID NO: 10172 - DNA, 196 bp, Artificial Sequence
  Synthetic polynucleotide
atcatctcaccttgcctcctggtatcgctaagtcggcacctgcaggaggggaatcccctagaaggggaatccccttcgaggggaatcccctgacaggggaatcccctctaaggggaatcccctactaggggaatccccttgcaggggaatcccctgtaaggggaatcccctggcgcgccatgcttcatcagactct

SEQ ID NO: 10173 - DNA, 196 bp, Artificial Sequence; identical to SEQ ID NO: 10172
  Synthetic polynucleotide

SEQ ID NO: 10174 - DNA, 180 bp, Artificial Sequence
  Synthetic polynucleotide
atcatctcaccttgcctcctgcaaacgtataatagccgcctgcaggggggcgaggagagaggggcgaggagtcgggggcgaggaggacggggcgaggagctaggggcgaggagactggggcgaggagtgcggggcgaggaggtaggggcgaggagggcgcgccatgcttcatcagactct

SEQ ID NO: 10175 - DNA, 180 bp, Artificial Sequence; identical to SEQ ID NO: 10174
  Synthetic polynucleotide

SEQ ID NO: 10176 - DNA, 172 bp, Artificial Sequence
  Synthetic polynucleotide
atcatctcaccttgcctcctgatttgtataccacgctccctgcaggggcgctgtccagaggcgctgtcctcgggcgctgtccgacggcgctgtccctaggcgctgtccactggcgctgtcctgcggcgctgtccgtaggcgctgtccggcgcgccatgcttcatcagactct

SEQ ID NO: 10177 - DNA, 172 bp, Artificial Sequence; identical to SEQ ID NO: 10176
  Synthetic polynucleotide

SEQ ID NO: 10178 - DNA, 190 bp, Artificial Sequence
  Synthetic polynucleotide
atcatctcaccttgcctcctgccagtcaaggcgttggtcctgcaggtgacctttgaacctagatgacctttgaaccttcgtgacctttgaacctgactgacctttgaacctctatgacctttgaacctacttgacctttgaaccttgctgacctttgaacctgtaggcgcgccatgcttcatcagactct

SEQ ID NO: 10179 - DNA, 190 bp, Artificial Sequence; identical to SEQ ID NO: 10178
  Synthetic polynucleotide

SEQ ID NO: 10180 - DNA, 172 bp, Artificial Sequence
  Synthetic polynucleotide
atcatctcaccttgcctcctgatcattgtgatctatgccctgcaggttggcgccaaagattggcgccaatcgttggcgccaagacttggcgccaactattggcgccaaactttggcgccaatgcttggcgccaagtattggcgccaaggcgcgccatgcttcatcagactct

SEQ ID NO: 10181 - DNA, 172 bp, Artificial Sequence; identical to SEQ ID NO: 10180
  Synthetic polynucleotide

SEQ ID NO: 10182 - DNA, 148 bp, Artificial Sequence
  Synthetic polynucleotide
atcatctcaccttgcctcctgagtttatacccgtacagcctgcagggcagagaagagcagagatcggcagagagacgcagagactagcagagaactgcagagatgcgcagagagtagcagagaggcgcgccatgcttcatcagactct

SEQ ID NO: 10183 - DNA, 148 bp, Artificial Sequence; identical to SEQ ID NO: 10182
  Synthetic polynucleotide

SEQ ID NO: 10184 - DNA, 190 bp, Artificial Sequence
  Synthetic polynucleotide
atcatctcaccttgcctcctgtttgggttatccctcgtcctgcaggtccgcccccgcattagatccgcccccgcatttcgtccgcccccgcattgactccgcccccgcattctatccgcccccgcattacttccgcccccgcatttgctccgcccccgcattgtaggcgcgccatgcttcatcagactct

SEQ ID NO: 10185 - DNA, 190 bp, Artificial Sequence; identical to SEQ ID NO: 10184
  Synthetic polynucleotide

SEQ ID NO: 10186 - DNA, 188 bp, Artificial Sequence
  Synthetic polynucleotide
atcatctcaccttgcctcctgcgatgttgtggtatattcctgcaggatgcataaattaagaatgcataaattatcgatgcataaattagacatgcataaattactaatgcataaattaactatgcataaattatgcatgcataaattagtaatgcataaattaggcgcgccatgcttcatcagactct

SEQ ID NO: 10187 - DNA, 188 bp, Artificial Sequence; identical to SEQ ID NO: 10186
  Synthetic polynucleotide

SEQ ID NO: 10188 - DNA, 180 bp, Artificial Sequence
  Synthetic polynucleotide
atcatctcaccttgcctcctgagacgataacgactcaacctgcaggttttatggcttagattttatggctttcgttttatggcttgacttttatggcttctattttatggcttactttttatggctttgcttttatggcttgtattttatggcttggcgcgccatgcttcatcagactct

SEQ ID NO: 10189 - DNA, 180 bp, Artificial Sequence; identical to SEQ ID NO: 10188
  Synthetic polynucleotide

SEQ ID NO: 10190 - DNA, 180 bp, Artificial Sequence
  Synthetic polynucleotide
atcatctcaccttgcctcctgtcgtaacataacctcaccctgcaggtcaaggtcataagatcaaggtcatatcgtcaaggtcatagactcaaggtcatactatcaaggtcataacttcaaggtcatatgctcaaggtcatagtatcaaggtcataggcgcgccatgcttcatcagactct

SEQ ID NO: 10191 - DNA, 180 bp, Artificial Sequence; identical to SEQ ID NO: 10190
  Synthetic polynucleotide

SEQ ID NO: 10192 - DNA, 185 bp, Artificial Sequence
  Synthetic polynucleotide
atcatctcaccttgcctcctgagctctgagtagtgtggcctgcaggctttaagtacttaatgagactttaagtacttaatgtcgctttaagtacttaatggacctttaagtacttaatgctactttaagtacttaatgactctttaagtacttaatgtgcggcgcgccatgcttcatcagactct

SEQ ID NO: 10193 - DNA, 185 bp, Artificial Sequence; identical to SEQ ID NO: 10192
  Synthetic polynucleotide

SEQ ID NO: 10194 - DNA, 180 bp, Artificial Sequence
  Synthetic polynucleotide
atcatctcaccttgcctcctgtattccataaccacccacctgcaggcttccaggaagagacttccaggaagtcgcttccaggaaggaccttccaggaagctacttccaggaagactcttccaggaagtgccttccaggaaggtacttccaggaagggcgcgccatgcttcatcagactct

SEQ ID NO: 10195 - DNA, 180 bp, Artificial Sequence; identical to SEQ ID NO: 10194
  Synthetic polynucleotide

SEQ ID NO: 10196 - DNA, 188 bp, Artificial Sequence
  Synthetic polynucleotide
atcatctcaccttgcctcctgacgctctattaacgaatcctgcagggctgagtcagcaagagctgagtcagcatcggctgagtcagcagacgctgagtcagcactagctgagtcagcaactgctgagtcagcatgcgctgagtcagcagtagctgagtcagcaggcgcgccatgcttcatcagactct

SEQ ID NO: 10197 - DNA, 188 bp, Artificial Sequence; identical to SEQ ID NO: 10196
  Synthetic polynucleotide

SEQ ID NO: 10198 - DNA, 190 bp, Artificial Sequence
  Synthetic polynucleotide
atcatctcaccttgcctcctggtaaaggaccacccgtccctgcagggttatgtaatgcatagagttatgtaatgcattcggttatgtaatgcatgacgttatgtaatgcatctagttatgtaatgcatactgttatgtaatgcattgcgttatgtaatgcatgtaggcgcgccatgcttcatcagactct

SEQ ID NO: 10199 - DNA, 190 bp, Artificial Sequence; identical to SEQ ID NO: 10198
  Synthetic polynucleotide

SEQ ID NO: 10200 - DNA, 197 bp, Artificial Sequence
  Synthetic polynucleotide
atcatctcaccttgcctcctggcatcctacacataagtcctgcagggaggtcaaaaggtcaagagaggtcaaaaggtcatcggaggtcaaaaggtcagacgaggtcaaaaggtcactagaggtcaaaaggtcaactgaggtcaaaaggtcatgcgaggtcaaaaggtcagtaggcgcgccatgcttcatcagactct

SEQ ID NO: 10201 - DNA, 197 bp, Artificial Sequence; identical to SEQ ID NO: 10200
  Synthetic polynucleotide

SEQ ID NO: 10202 - DNA, 200 bp, Artificial Sequence
  Synthetic polynucleotide
atcatctcaccttgcctcctggtagtcccacgcaaccacctgcagggcggacgttcaacgtccgcagagcggacgttcaacgtccgctcggcggacgttcaacgtccgcgacgcggacgttcaacgtccgcctagcggacgttcaacgtccgcactgcggacgttcaacgtccgcggcgcgccatgcttcatcagactct

SEQ ID NO: 10203 - DNA, 200 bp, Artificial Sequence; identical to SEQ ID NO: 10202
  Synthetic polynucleotide

SEQ ID NO: 10204 - DNA, 180 bp, Artificial Sequence
  Synthetic polynucleotide
atcatctcaccttgcctcctgaaggaagggaaccacgccctgcaggaccgtgggaaaagaaccgtgggaaatcgaccgtgggaaagacaccgtgggaaactaaccgtgggaaaactaccgtgggaaatgcaccgtgggaaagtaaccgtgggaaaggcgcgccatgcttcatcagactct

SEQ ID NO: 10205 - DNA, 180 bp, Artificial Sequence; identical to SEQ ID NO: 10204
  Synthetic polynucleotide

SEQ ID NO: 10206 - DNA, 191 bp, Artificial Sequence
  Synthetic polynucleotide
atcatctcaccttgcctcctgcgaggttggttgatatacctgcaggtcacccatcaataatcaagatcacccatcaataatcatcgtcacccatcaataatcagactcacccatcaataatcactatcacccatcaataatcaacttcacccatcaataatcatgcggcgcgccatgcttcatcagactct

SEQ ID NO: 10207 - DNA, 191 bp, Artificial Sequence; identical to SEQ ID NO: 10206
  Synthetic polynucleotide

SEQ ID NO: 10208 - DNA, 156 bp, Artificial Sequence
  Synthetic polynucleotide
atcatctcaccttgcctcctgcttggttaagtttgacgcctgcaggcgatattgagacgatattgtcgcgatattggaccgatattgctacgatattgactcgatattgtgccgatattggtacgatattgggcgcgccatgcttcatcagactct

SEQ ID NO: 10209 - DNA, 156 bp, Artificial Sequence; identical to SEQ ID NO: 10208
  Synthetic polynucleotide

SEQ ID NO: 10210 - DNA, 164 bp, Artificial Sequence
  Synthetic polynucleotide
atcatctcaccttgcctcctggcctacctcaaagaccgcctgcaggcacctgttgagacacctgttgtcgcacctgttggaccacctgttgctacacctgttgactcacctgttgtgccacctgttggtacacctgttgggcgcgccatgcttcatcagactct

SEQ ID NO: 10211 - DNA, 164 bp, Artificial Sequence; identical to SEQ ID NO: 10210
  Synthetic polynucleotide

SEQ ID NO: 10212 - DNA, 190 bp, Artificial Sequence
  Synthetic polynucleotide
atcatctcaccttgcctcctggcggaatcagatccgtacctgcaggattatcgattttttagaattatcgatttttttcgattatcgattttttgacattatcgattttttctaattatcgattttttactattatcgatttttttgcattatcgattttttgtaggcgcgccatgcttcatcagactct

SEQ ID NO: 10213 - DNA, 190 bp, Artificial Sequence; identical to SEQ ID NO: 10212
  Synthetic polynucleotide

SEQ ID NO: 10214 - DNA, 172 bp, Artificial Sequence
  Synthetic polynucleotide
atcatctcaccttgcctcctgtgttccttctgttcgtccctgcaggttggggggctagattggggggcttcgttggggggctgacttggggggctctattggggggctactttggggggcttgcttggggggctgtattggggggctggcgcgccatgcttcatcagactct

SEQ ID NO: 10215 - DNA, 172 bp, Artificial Sequence; identical to SEQ ID NO: 10214
  Synthetic polynucleotide

SEQ ID NO: 10216 - DNA, 191 bp, Artificial Sequence
  Synthetic polynucleotide
atcatctcaccttgcctcctgtggtttctttgggtgggcctgcagggattattaattaacttgagagattattaattaacttgtcggattattaattaacttggacgattattaattaacttgctagattattaattaacttgactgattattaattaacttgtgcggcgcgccatgcttcatcagactct

SEQ ID NO: 10217 - DNA, 191 bp, Artificial Sequence; identical to SEQ ID NO: 10216
  Synthetic polynucleotide

SEQ ID NO: 10218 - DNA, 185 bp, Artificial Sequence
  Synthetic polynucleotide
atcatctcaccttgcctcctgtggttctcgtactctggcctgcaggtgttacttctttctgcagatgttacttctttctgctcgtgttacttctttctgcgactgttacttctttctgcctatgttacttctttctgcacttgttacttctttctgctgcggcgcgccatgcttcatcagactct

SEQ ID NO: 10219 - DNA, 185 bp, Artificial Sequence; identical to SEQ ID NO: 10218
  Synthetic polynucleotide

SEQ ID NO: 10220 - DNA, 172 bp, Artificial Sequence
  Synthetic polynucleotide
atcatctcaccttgcctcctgagccctaatttgatgtgcctgcagggacgtgggcgagagacgtgggcgtcggacgtgggcggacgacgtgggcgctagacgtgggcgactgacgtgggcgtgcgacgtgggcggtagacgtgggcgggcgcgccatgcttcatcagactct

SEQ ID NO: 10221 - DNA, 172 bp, Artificial Sequence; identical to SEQ ID NO: 10220
  Synthetic polynucleotide

SEQ ID NO: 10222 - DNA, 156 bp, Artificial Sequence
  Synthetic polynucleotide
atcatctcaccttgcctcctgactacagcatatgagtacctgcaggtgacaggtagatgacaggttcgtgacaggtgactgacaggtctatgacaggtacttgacaggttgctgacaggtgtatgacaggtggcgcgccatgcttcatcagactct

SEQ ID NO: 10223 - DNA, 156 bp, Artificial Sequence; identical to SEQ ID NO: 10222
  Synthetic polynucleotide

SEQ ID NO: 10224 - DNA, 191 bp, Artificial Sequence
  Synthetic polynucleotide
atcatctcaccttgcctcctgctttcaggatggtacggcctgcaggttaaggggattaactacagattaaggggattaactactcgttaaggggattaactacgacttaaggggattaactacctattaaggggattaactacactttaaggggattaactactgcggcgcgccatgcttcatcagactct

SEQ ID NO: 10225 - DNA, 191 bp, Artificial Sequence; identical to SEQ ID NO: 10224
  Synthetic polynucleotide

SEQ ID NO: 10226 - DNA, 172 bp, Artificial Sequence
  Synthetic polynucleotide
atcatctcaccttgcctcctgaggactcgggtctccaacctgcaggtcttaattagagatcttaattagtcgtcttaattaggactcttaattagctatcttaattagacttcttaattagtgctcttaattaggtatcttaattagggcgcgccatgcttcatcagactct

SEQ ID NO: 10227 - DNA, 172 bp, Artificial Sequence; identical to SEQ ID NO: 10226
  Synthetic polynucleotide

SEQ ID NO: 10228 - DNA, 185 bp, Artificial Sequence
  Synthetic polynucleotide
atcatctcaccttgcctcctgatgatgcagatgcagagcctgcaggaacaatgtgcagtgttagaaacaatgtgcagtgtttcgaacaatgtgcagtgttgacaacaatgtgcagtgttctaaacaatgtgcagtgttactaacaatgtgcagtgtttgcggcgcgccatgcttcatcagactct

SEQ ID NO: 10229 - DNA, 185 bp, Artificial Sequence; identical to SEQ ID NO: 10228
  Synthetic polynucleotide

SEQ ID NO: 10230 - DNA, 172 bp, Artificial Sequence
  Synthetic polynucleotide
atcatctcaccttgcctcctgcgaccgaaatagcaaagcctgcaggtgtttacataagatgtttacatatcgtgtttacatagactgtttacatactatgtttacataacttgtttacatatgctgtttacatagtatgtttacataggcgcgccatgcttcatcagactct

SEQ ID NO: 10231 - DNA, 172 bp, Artificial Sequence; identical to SEQ ID NO: 10230
  Synthetic polynucleotide

SEQ ID NO: 10232 - DNA, 190 bp, Artificial Sequence
  Synthetic polynucleotide
atcatctcaccttgcctcctggaccgtgtggcgtataacctgcaggaggagatgactcatagaaggagatgactcattcgaggagatgactcatgacaggagatgactcatctaaggagatgactcatactaggagatgactcattgcaggagatgactcatgtaggcgcgccatgcttcatcagactct

SEQ ID NO: 10233 - DNA, 190 bp, Artificial Sequence; identical to SEQ ID NO: 10232
  Synthetic polynucleotide

SEQ ID NO: 10234 - DNA, 197 bp, Artificial Sequence
  Synthetic polynucleotide
atcatctcaccttgcctcctgagggaggcgatacatgccctgcaggcatggagttttccacagacatggagttttccactcgcatggagttttccacgaccatggagttttccacctacatggagttttccacactcatggagttttccactgccatggagttttccacgtaggcgcgccatgcttcatcagactct

SEQ ID NO: 10235 - DNA, 197 bp, Artificial Sequence; identical to SEQ ID NO: 10234
  Synthetic polynucleotide

SEQ ID NO: 10236 - DNA, 156 bp, Artificial Sequence
  Synthetic polynucleotide
atcatctcaccttgcctcctgagtggctatccaatctccctgcagggccacgtgagagccacgtgtcggccacgtggacgccacgtgctagccacgtgactgccacgtgtgcgccacgtggtagccacgtgggcgcgccatgcttcatcagactct

SEQ ID NO: 10237 - DNA, 156 bp, Artificial Sequence; identical to SEQ ID NO: 10236
  Synthetic polynucleotide

SEQ ID NO: 10238 - DNA, 172 bp, Artificial Sequence
  Synthetic polynucleotide
atcatctcaccttgcctcctgctgatgcgtcgagacttcctgcaggtgactcagcaagatgactcagcatcgtgactcagcagactgactcagcactatgactcagcaacttgactcagcatgctgactcagcagtatgactcagcaggcgcgccatgcttcatcagactct

SEQ ID NO: 10239 - DNA, 172 bp, Artificial Sequence; identical to SEQ ID NO: 10238
  Synthetic polynucleotide

SEQ ID NO: 10240 - DNA, 164 bp, Artificial Sequence
  Synthetic polynucleotide
atcatctcaccttgcctcctgaacatacctagcttactcctgcaggccagctgatagaccagctgattcgccagctgatgacccagctgatctaccagctgatactccagctgattgcccagctgatgtaccagctgatggcgcgccatgcttcatcagactct

SEQ ID NO: 10241 - DNA, 164 bp, Artificial Sequence; identical to SEQ ID NO: 10240
  Synthetic polynucleotide

SEQ ID NO: 10242 - DNA, 164 bp, Artificial Sequence
  Synthetic polynucleotide
atcatctcaccttgcctcctgtggcgaccatcctgttacctgcaggcacttgaaaagacacttgaaatcgcacttgaaagaccacttgaaactacacttgaaaactcacttgaaatgccacttgaaagtacacttgaaaggcgcgccatgcttcatcagactct

SEQ ID NO: 10243 - DNA, 164 bp, Artificial Sequence; identical to SEQ ID NO: 10242
  Synthetic polynucleotide

SEQ ID NO: 10244 - DNA, 200 bp, Artificial Sequence
  Synthetic polynucleotide
atcatctcaccttgcctcctgcctatcatgtcccgatacctgcaggcttaatctacatttaacatagacttaatctacatttaacattcgcttaatctacatttaacatgaccttaatctacatttaacatctacttaatctacatttaacatactcttaatctacatttaacatggcgcgccatgcttcatcagactct

SEQ ID NO: 10245 - DNA, 200 bp, Artificial Sequence; identical to SEQ ID NO: 10244
  Synthetic polynucleotide

SEQ ID NO: 10246 - DNA, 197 bp, Artificial Sequence
  Synthetic polynucleotide
atcatctcaccttgcctcctggacaggtaggctgcatacctgcaggtagtagccatggcaacaaagatagtagccatggcaacaatcgtagtagccatggcaacaagactagtagccatggcaacaactatagtagccatggcaacaaacttagtagccatggcaacaatgcggcgcgccatgcttcatcagactct

SEQ ID NO: 10247 - DNA, 197 bp, Artificial Sequence; identical to SEQ ID NO: 10246
  Synthetic polynucleotide

SEQ ID NO: 10248 - DNA, 172 bp, Artificial Sequence
  Synthetic polynucleotide
atcatctcaccttgcctcctgttattcaccacaccgcccctgcaggtgtttacattagatgtttacatttcgtgtttacattgactgtttacattctatgtttacattacttgtttacatttgctgtttacattgtatgtttacattggcgcgccatgcttcatcagactct

SEQ ID NO: 10249 - DNA, 172 bp, Artificial Sequence; identical to SEQ ID NO: 10248
  Synthetic polynucleotide

SEQ ID NO: 10250 - DNA, 172 bp, Artificial Sequence
  Synthetic polynucleotide
atcatctcaccttgcctcctgtgcctacgtcgttgtttcctgcagggttgctaaggagagttgctaaggtcggttgctaagggacgttgctaaggctagttgctaaggactgttgctaaggtgcgttgctaagggtagttgctaaggggcgcgccatgcttcatcagactct

SEQ ID NO: 10251 - DNA, 172 bp, Artificial Sequence; identical to SEQ ID NO: 10250
  Synthetic polynucleotide

SEQ ID NO: 10252 - DNA, 185 bp, Artificial Sequence
  Synthetic polynucleotide
atcatctcaccttgcctcctgcatgacggatattcaaccctgcaggagggttatttttagagagaagggttatttttagagtcgagggttatttttagaggacagggttatttttagagctaagggttatttttagagactagggttatttttagagtgcggcgcgccatgcttcatcagactct

SEQ ID NO: 10253 - DNA, 185 bp, Artificial Sequence; identical to SEQ ID NO: 10252
  Synthetic polynucleotide

SEQ ID NO: 10254 - DNA, 191 bp, Artificial Sequence
  Synthetic polynucleotide
atcatctcaccttgcctcctggcacacccaaacctctccctgcagggagtgtacgtacgatggagagagtgtacgtacgatggtcggagtgtacgtacgatgggacgagtgtacgtacgatggctagagtgtacgtacgatggactgagtgtacgtacgatggtgcggcgcgccatgcttcatcagactct

SEQ ID NO: 10255 - DNA, 191 bp, Artificial Sequence; identical to SEQ ID NO: 10254
  Synthetic polynucleotide

SEQ ID NO: 10256 - DNA, 164 bp, Artificial Sequence
  Synthetic polynucleotide
atcatctcaccttgcctcctggcgtgggaatctagagtcctgcaggagcgtgacgagaagcgtgacgtcgagcgtgacggacagcgtgacgctaagcgtgacgactagcgtgacgtgcagcgtgacggtaagcgtgacgggcgcgccatgcttcatcagactct

SEQ ID NO: 10257 - DNA, 164 bp, Artificial Sequence; identical to SEQ ID NO: 10256
  Synthetic polynucleotide

SEQ ID NO: 10258 - DNA, 196 bp, Artificial Sequence
  Synthetic polynucleotide
atcatctcaccttgcctcctgattgatctaggtggtgtcctgcaggttttctgggaattagattttctgggaatttcgttttctgggaattgacttttctgggaattctattttctgggaattactttttctgggaatttgcttttctgggaattgtattttctgggaattggcgcgccatgcttcatcagactct

SEQ ID NO: 10259 - DNA, 196 bp, Artificial Sequence; identical to SEQ ID NO: 10258
  Synthetic polynucleotide

SEQ ID NO: 10260 - DNA, 172 bp, Artificial Sequence
  Synthetic polynucleotide
atcatctcaccttgcctcctgggacggagcaaagttggcctgcaggtcagaggtcaagatcagaggtcatcgtcagaggtcagactcagaggtcactatcagaggtcaacttcagaggtcatgctcagaggtcagtatcagaggtcaggcgcgccatgcttcatcagactct

SEQ ID NO: 10261 - DNA, 172 bp, Artificial Sequence; identical to SEQ ID NO: 10260
  Synthetic polynucleotide

SEQ ID NO: 10262 - DNA, 191 bp, Artificial Sequence
  Synthetic polynucleotide
atcatctcaccttgcctcctggtgaaagctttattcaccctgcaggatccttaagtggttaagagaatccttaagtggttaagtcgatccttaagtggttaaggacatccttaagtggttaagctaatccttaagtggttaagactatccttaagtggttaagtgcggcgcgccatgcttcatcagactct

SEQ ID NO: 10263 - DNA, 191 bp, Artificial Sequence; identical to SEQ ID NO: 10262
  Synthetic polynucleotide

SEQ ID NO: 10264 - DNA, 164 bp, Artificial Sequence
  Synthetic polynucleotide
atcatctcaccttgcctcctgtctctcattagcgtagacctgcaggcagatagggagacagatagggtcgcagataggggaccagatagggctacagatagggactcagatagggtgccagataggggtacagatagggggcgcgccatgcttcatcagactct

SEQ ID NO: 10265 - DNA, 164 bp, Artificial Sequence; identical to SEQ ID NO: 10264
  Synthetic polynucleotide

SEQ ID NO: 10266 - DNA, 191 bp, Artificial Sequence
  Synthetic polynucleotide
atcatctcaccttgcctcctgtcaaacacgtgagtattcctgcaggcctgctgggagttgtagtcccagacctgctgggagttgtagtccctcgcctgctgggagttgtagtcccgaccctgctgggagttgtagtcccctacctgctgggagttgtagtcccactggcgcgccatgcttcatcagactct

SEQ ID NO: 10267 - DNA, 191 bp, Artificial Sequence; identical to SEQ ID NO: 10266
  Synthetic polynucleotide

SEQ ID NO: 10268 - DNA, 164 bp, Artificial Sequence
  Synthetic polynucleotide
atcatctcaccttgcctcctgcgatatctgttgaacgacctgcaggacctgcaggagaacctgcaggtcgacctgcagggacacctgcaggctaacctgcaggactacctgcaggtgcacctgcagggtaacctgcaggggcgcgccatgcttcatcagactct

SEQ ID NO: 10269 - DNA, 164 bp, Artificial Sequence; identical to SEQ ID NO: 10268
  Synthetic polynucleotide

SEQ ID NO: 10270 - DNA, 196 bp, Artificial Sequence
  Synthetic polynucleotide
atcatctcaccttgcctcctgggaagtctgtaccaactcctgcaggtgtttatttacttagatgtttatttactttcgtgtttatttacttgactgtttatttacttctatgtttatttacttacttgtttatttactttgctgtttatttacttgtatgtttatttacttggcgcgccatgcttcatcagactct

SEQ ID NO: 10271 - DNA, 196 bp, Artificial Sequence; identical to SEQ ID NO: 10270
  Synthetic polynucleotide

SEQ ID NO: 10272 - DNA, 164 bp, Artificial Sequence
  Synthetic polynucleotide
atcatctcaccttgcctcctgtatcaatatcggtatggcctgcaggacccgcatcagaacccgcatctcgacccgcatcgacacccgcatcctaacccgcatcactacccgcatctgcacccgcatcgtaacccgcatcggcgcgccatgcttcatcagactct

SEQ ID NO: 10273 - DNA, 164 bp, Artificial Sequence; identical to SEQ ID NO: 10272
  Synthetic polynucleotide

SEQ ID NO: 10274 - DNA, 197 bp, Artificial Sequence
  Synthetic polynucleotide
atcatctcaccttgcctcctgcattcagcaagtttgagcctgcaggatgatccgggaccacagaatgatccgggaccactcgatgatccgggaccacgacatgatccgggaccacctaatgatccgggaccacactatgatccgggaccactgcatgatccgggaccacgtaggcgcgccatgcttcatcagactct

SEQ ID NO: 10275 - DNA, 197 bp, Artificial Sequence; identical to SEQ ID NO: 10274
  Synthetic polynucleotide

SEQ ID NO: 10276 - DNA, 197 bp, Artificial Sequence
  Synthetic polynucleotide
atcatctcaccttgcctcctggtagtgtcgattctcaacctgcaggtagagcagaaatatcagatagagcagaaatatctcgtagagcagaaatatcgactagagcagaaatatcctatagagcagaaatatcacttagagcagaaatatctgctagagcagaaatatcgtaggcgcgccatgcttcatcagactct

SEQ ID NO: 10277 - DNA, 197 bp, Artificial Sequence; identical to SEQ ID NO: 10276
  Synthetic polynucleotide

SEQ ID NO: 10278 - DNA, 196 bp, Artificial Sequence
  Synthetic polynucleotide
atcatctcaccttgcctcctgctgtcctagaacgagctcctgcaggcgccccctggtggagacgccccctggtggtcgcgccccctggtgggaccgccccctggtggctacgccccctggtggactcgccccctggtggtgccgccccctggtgggtacgccccctggtggggcgcgccatgcttcatcagactct

SEQ ID NO: 10279 - DNA, 196 bp, Artificial Sequence; identical to SEQ ID NO: 10278
  Synthetic polynucleotide

SEQ ID NO: 10280 - DNA, 172 bp, Artificial Sequence
  Synthetic polynucleotide
atcatctcaccttgcctcctgcaagtacacccaagactcctgcagggtaacagctgagagtaacagctgtcggtaacagctggacgtaacagctgctagtaacagctgactgtaacagctgtgcgtaacagctggtagtaacagctgggcgcgccatgcttcatcagactct

SEQ ID NO: 10281 - DNA, 172 bp, Artificial Sequence; identical to SEQ ID NO: 10280
  Synthetic polynucleotide

SEQ ID NO: 10282 - DNA, 180 bp, Artificial Sequence
  Synthetic polynucleotide
atcatctcaccttgcctcctggaagagggttgtgacggcctgcagggtctgtggtttagagtctgtggttttcggtctgtggtttgacgtctgtggtttctagtctgtggtttactgtctgtggttttgcgtctgtggtttgtagtctgtggtttggcgcgccatgcttcatcagactct

SEQ ID NO: 10283 - DNA, 180 bp, Artificial Sequence; identical to SEQ ID NO: 10282
  Synthetic polynucleotide

SEQ ID NO: 10284 - DNA, 197 bp, Artificial Sequence
  Synthetic polynucleotide
atcatctcaccttgcctcctggcatatttgggtcatatcctgcaggtatagcgccctctggtggagatatagcgccctctggtggtcgtatagcgccctctggtgggactatagcgccctctggtggctatatagcgccctctggtggacttatagcgccctctggtggtgcggcgcgccatgcttcatcagactct

SEQ ID NO: 10285 - DNA, 197 bp, Artificial Sequence; identical to SEQ ID NO: 10284
  Synthetic polynucleotide

SEQ ID NO: 10286 - DNA, 190 bp, Artificial Sequence
  Synthetic polynucleotide
atcatctcaccttgcctcctgactgaagtgccgcacatcctgcaggtgggagttgtagttagatgggagttgtagtttcgtgggagttgtagttgactgggagttgtagttctatgggagttgtagttacttgggagttgtagtttgctgggagttgtagttgtaggcgcgccatgcttcatcagactct

SEQ ID NO: 10287 - DNA, 190 bp, Artificial Sequence; identical to SEQ ID NO: 10286
  Synthetic polynucleotide

SEQ ID NO: 10288 - DNA, 156 bp, Artificial Sequence
  Synthetic polynucleotide
atcatctcaccttgcctcctgcctagcgtcttgaaggtcctgcaggaggattaaagaaggattaatcgaggattaagacaggattaactaaggattaaactaggattaatgcaggattaagtaaggattaaggcgcgccatgcttcatcagactct

SEQ ID NO: 10289 - DNA, 156 bp, Artificial Sequence; identical to SEQ ID NO: 10288
  Synthetic polynucleotide

SEQ ID NO: 10290 - DNA, 188 bp, Artificial Sequence
  Synthetic polynucleotide
atcatctcaccttgcctcctggtaaacgctagccttgacctgcaggggccacttgagaagaggccacttgagatcgggccacttgagagacggccacttgagactaggccacttgagaactggccacttgagatgcggccacttgagagtaggccacttgagaggcgcgccatgcttcatcagactct

SEQ ID NO: 10291 - DNA, 188 bp, Artificial Sequence; identical to SEQ ID NO: 10290
  Synthetic polynucleotide

SEQ ID NO: 10292 - DNA, 156 bp, Artificial Sequence
  Synthetic polynucleotide
atcatctcaccttgcctcctgctcgagtgggtcaagcacctgcaggaggattagagaaggattagtcgaggattaggacaggattagctaaggattagactaggattagtgcaggattaggtaaggattagggcgcgccatgcttcatcagactct

SEQ ID NO: 10293 - DNA, 156 bp, Artificial Sequence; identical to SEQ ID NO: 10292
  Synthetic polynucleotide

SEQ ID NO: 10294 - DNA, 172 bp, Artificial Sequence
  Synthetic polynucleotide
atcatctcaccttgcctcctgcgcgaatacactgtaatcctgcaggtatccggtttagatatccggttttcgtatccggtttgactatccggtttctatatccggtttacttatccggttttgctatccggtttgtatatccggtttggcgcgccatgcttcatcagactct

SEQ ID NO: 10295 - DNA, 172 bp, Artificial Sequence; identical to SEQ ID NO: 10294
  Synthetic polynucleotide

SEQ ID NO: 10296 - DNA, 191 bp, Artificial Sequence
  Synthetic polynucleotide
atcatctcaccttgcctcctgggtgactcgttagagcccctgcaggagtgccgtgtgcaaaacagaagtgccgtgtgcaaaactcgagtgccgtgtgcaaaacgacagtgccgtgtgcaaaacctaagtgccgtgtgcaaaacactagtgccgtgtgcaaaactgcggcgcgccatgcttcatcagactct

SEQ ID NO: 10297 - DNA, 191 bp, Artificial Sequence; identical to SEQ ID NO: 10296
  Synthetic polynucleotide

SEQ ID NO: 10298 - DNA, 188 bp, Artificial Sequence
  Synthetic polynucleotide
atcatctcaccttgcctcctgcgcttagctcaatgggtcctgcaggtggggtgatcgcagatggggtgatcgctcgtggggtgatcgcgactggggtgatcgcctatggggtgatcgcacttggggtgatcgctgctggggtgatcgcgtatggggtgatcgcggcgcgccatgcttcatcagactct

SEQ ID NO: 10299 - DNA, 188 bp, Artificial Sequence; identical to SEQ ID NO: 10298
  Synthetic polynucleotide

SEQ ID NO: 10300 - DNA, 188 bp, Artificial Sequence
  Synthetic polynucleotide
atcatctcaccttgcctcctgcgttagtactcgggtgacctgcagggattgatggtagagagattgatggtagtcggattgatggtaggacgattgatggtagctagattgatggtagactgattgatggtagtgcgattgatggtaggtagattgatggtagggcgcgccatgcttcatcagactct

SEQ ID NO: 10301 - DNA, 188 bp, Artificial Sequence; identical to SEQ ID NO: 10300
  Synthetic polynucleotide

SEQ ID NO: 10302 - DNA, 190 bp, Artificial Sequence
  Synthetic polynucleotide
atcatctcaccttgcctcctgctcgaatgctgcctcctcctgcaggctcgaacccgtgccagactcgaacccgtgcctcgctcgaacccgtgccgacctcgaacccgtgccctactcgaacccgtgccactctcgaacccgtgcctgcctcgaacccgtgccgtaggcgcgccatgcttcatcagactct

SEQ ID NO: 10303 - DNA, 190 bp, Artificial Sequence; identical to SEQ ID NO: 10302
  Synthetic polynucleotide

SEQ ID NO: 10304 - DNA, 188 bp, Artificial Sequence
  Synthetic polynucleotide
atcatctcaccttgcctcctgtacattgtacggaattgcctgcagggcgtacgtgcggagagcgtacgtgcggtcggcgtacgtgcgggacgcgtacgtgcggctagcgtacgtgcggactgcgtacgtgcggtgcgcgtacgtgcgggtagcgtacgtgcggggcgcgccatgcttcatcagactct

SEQ ID NO: 10305 - DNA, 188 bp, Artificial Sequence; identical to SEQ ID NO: 10304
  Synthetic polynucleotide

SEQ ID NO: 10306 - DNA, 190 bp, Artificial Sequence
  Synthetic polynucleotide
atcatctcaccttgcctcctgcaacgatagaatcgctacctgcaggttcagcaccatggaagattcagcaccatggatcgttcagcaccatggagacttcagcaccatggactattcagcaccatggaactttcagcaccatggatgcttcagcaccatggagtaggcgcgccatgcttcatcagactct

SEQ ID NO: 10307 - DNA, 190 bp, Artificial Sequence; identical to SEQ ID NO: 10306
  Synthetic polynucleotide

SEQ ID NO: 10308 - DNA, 190 bp, Artificial Sequence
  Synthetic polynucleotide
atcatctcaccttgcctcctgtatctatttgtgggtcccctgcaggcgatgacgtcatcaagacgatgacgtcatcatcgcgatgacgtcatcagaccgatgacgtcatcactacgatgacgtcatcaactcgatgacgtcatcatgccgatgacgtcatcagtaggcgcgccatgcttcatcagactct

SEQ ID NO: 10309 - DNA, 190 bp, Artificial Sequence; identical to SEQ ID NO: 10308
  Synthetic polynucleotide

SEQ ID NO: 10310 - DNA, 180 bp, Artificial Sequence
  Synthetic polynucleotide
atcatctcaccttgcctcctgcgtatcaaagataggaacctgcaggggaatctccctagaggaatctcccttcgggaatctccctgacggaatctccctctaggaatctccctactggaatctcccttgcggaatctccctgtaggaatctccctggcgcgccatgcttcatcagactct

SEQ ID NO: 10311 - DNA, 180 bp, Artificial Sequence; identical to SEQ ID NO: 10310
  Synthetic polynucleotide

SEQ ID NO: 10312 - DNA, 164 bp, Artificial Sequence
  Synthetic polynucleotide
atcatctcaccttgcctcctgggaatcgctccgcataacctgcaggattcatcctagaattcatccttcgattcatcctgacattcatcctctaattcatcctactattcatccttgcattcatcctgtaattcatcctggcgcgccatgcttcatcagactct

SEQ ID NO: 10313 - DNA, 164 bp, Artificial Sequence; identical to SEQ ID NO: 10312
  Synthetic polynucleotide

SEQ ID NO: 10314 - DNA, 164 bp, Artificial Sequence
  Synthetic polynucleotide
atcatctcaccttgcctcctgtacctttggattcgagccctgcaggcttacgtcaagacttacgtcatcgcttacgtcagaccttacgtcactacttacgtcaactcttacgtcatgccttacgtcagtacttacgtcaggcgcgccatgcttcatcagactct

SEQ ID NO: 10315 - DNA, 164 bp, Artificial Sequence; identical to SEQ ID NO: 10314
  Synthetic polynucleotide

SEQ ID NO: 10316 - DNA, 164 bp, Artificial Sequence
  Synthetic polynucleotide
atcatctcaccttgcctcctggtcatccatcgccttctcctgcaggcctaatgagagacctaatgagtcgcctaatgaggaccctaatgagctacctaatgagactcctaatgagtgccctaatgaggtacctaatgagggcgcgccatgcttcatcagactct

SEQ ID NO: 10317 - DNA, 164 bp, Artificial Sequence; identical to SEQ ID NO: 10316
  Synthetic polynucleotide

SEQ ID NO: 10318 - DNA, 196 bp, Artificial Sequence
  Synthetic polynucleotide
atcatctcaccttgcctcctgtggttgtggtcaactgtcctgcaggtaaataaacaatcagataaataaacaatctcgtaaataaacaatcgactaaataaacaatcctataaataaacaatcacttaaataaacaatctgctaaataaacaatcgtataaataaacaatcggcgcgccatgcttcatcagactct

SEQ ID NO: 10319 - DNA, 196 bp, Artificial Sequence; identical to SEQ ID NO: 10318
  Synthetic polynucleotide

SEQ ID NO: 10320 - DNA, 197 bp, Artificial Sequence
  Synthetic polynucleotide
atcatctcaccttgcctcctgttagattaggcacctgtcctgcaggcacttccgcttccggagacacttccgcttccggtcgcacttccgcttccgggaccacttccgcttccggctacacttccgcttccggactcacttccgcttccggtgccacttccgcttccgggtaggcgcgccatgcttcatcagactct

SEQ ID NO: 10321 - DNA, 197 bp, Artificial Sequence; identical to SEQ ID NO: 10320
  Synthetic polynucleotide

SEQ ID NO: 10322 - DNA, 188 bp, Artificial Sequence
  Synthetic polynucleotide
atcatctcaccttgcctcctgttaacgccgacgcagtgcctgcaggggtgacgtaactagaggtgacgtaacttcgggtgacgtaactgacggtgacgtaactctaggtgacgtaactactggtgacgtaacttgcggtgacgtaactgtaggtgacgtaactggcgcgccatgcttcatcagactct

SEQ ID NO: 10323 - DNA, 188 bp, Artificial Sequence; identical to SEQ ID NO: 10322
  Synthetic polynucleotide

SEQ ID NO: 10324 - DNA, 156 bp, Artificial Sequence
  Synthetic polynucleotide
atcatctcaccttgcctcctgcatgcgttcttcccgcacctgcaggcaataaatagacaataaattcgcaataaatgaccaataaatctacaataaatactcaataaattgccaataaatgtacaataaatggcgcgccatgcttcatcagactct

SEQ ID NO: 10325 - DNA, 156 bp, Artificial Sequence; identical to SEQ ID NO: 10324
  Synthetic polynucleotide

SEQ ID NO: 10326 - DNA, 198 bp, Artificial Sequence
  Synthetic polynucleotide
atcatctcaccttgcctcctgataccaatagggaattgcctgcaggccccctgacctttgccctctgccagaccccctgacctttgccctctgcctcgccccctgacctttgccctctgccgacccccctgacctttgccctctgccctaccccctgacctttgccctctgccggcgcgccatgcttcatcagactct

SEQ ID NO: 10327 - DNA, 198 bp, Artificial Sequence; identical to SEQ ID NO: 10326
  Synthetic polynucleotide

SEQ ID NO: 10328 - DNA, 190 bp, Artificial Sequence
  Synthetic polynucleotide
atcatctcaccttgcctcctgcctaagtatcacgtcttcctgcaggcgatgacgtcatcgagacgatgacgtcatcgtcgcgatgacgtcatcggaccgatgacgtcatcgctacgatgacgtcatcgactcgatgacgtcatcgtgccgatgacgtcatcggtaggcgcgccatgcttcatcagactct

SEQ ID NO: 10329 - DNA, 190 bp, Artificial Sequence; identical to SEQ ID NO: 10328
  Synthetic polynucleotide

SEQ ID NO: 10330 - DNA, 148 bp, Artificial Sequence
  Synthetic polynucleotide
atcatctcaccttgcctcctgacggaggaacatctagccctgcaggtaataaaagataataaatcgtaataaagactaataaactataataaaacttaataaatgctaataaagtataataaaggcgcgccatgcttcatcagactct

SEQ ID NO: 10331 - DNA, 148 bp, Artificial Sequence; identical to SEQ ID NO: 10330
  Synthetic polynucleotide

SEQ ID NO: 10332 - DNA, 191 bp, Artificial Sequence
  Synthetic polynucleotide
atcatctcaccttgcctcctgaagtgggttggagcacccctgcaggaaaggtcaaaggtcaacagaaaaggtcaaaggtcaactcgaaaggtcaaaggtcaacgacaaaggtcaaaggtcaacctaaaaggtcaaaggtcaacactaaaggtcaaaggtcaactgcggcgcgccatgcttcatcagactct

SEQ ID NO: 10333 - DNA, 191 bp, Artificial Sequence; identical to SEQ ID NO: 10332
  Synthetic polynucleotide

SEQ ID NO: 10334 - DNA, 191 bp, Artificial Sequence
  Synthetic polynucleotide
atcatctcaccttgcctcctgggtggattcagacgaaccctgcaggtgccttatctgccccccccagagatgccttatctgccccccccagtcgtgccttatctgccccccccaggactgccttatctgccccccccagctatgccttatctgccccccccagactggcgcgccatgcttcatcagactct

SEQ ID NO: 10335 - DNA, 191 bp, Artificial Sequence; identical to SEQ ID NO: 10334
  Synthetic polynucleotide

SEQ ID NO: 10336 - DNA, 164 bp, Artificial Sequence
  Synthetic polynucleotide
atcatctcaccttgcctcctgaacctgcatggatagtacctgcaggcttacgcaaagacttacgcaatcgcttacgcaagaccttacgcaactacttacgcaaactcttacgcaatgccttacgcaagtacttacgcaaggcgcgccatgcttcatcagactct

SEQ ID NO: 10337 - DNA, 164 bp, Artificial Sequence; identical to SEQ ID NO: 10336
  Synthetic polynucleotide

SEQ ID NO: 10338 - DNA, 200 bp, Artificial Sequence
  Synthetic polynucleotide
atcatctcaccttgcctcctgttgcgcaaggttggagtcctgcaggccatggccaaataaggcaaagaccatggccaaataaggcaatcgccatggccaaataaggcaagacccatggccaaataaggcaactaccatggccaaataaggcaaactccatggccaaataaggcaaggcgcgccatgcttcatcagactct

SEQ ID NO: 10339 - DNA, 200 bp, Artificial Sequence; identical to SEQ ID NO: 10338
  Synthetic polynucleotide

SEQ ID NO: 10340 - DNA, 172 bp, Artificial Sequence
  Synthetic polynucleotide
atcatctcaccttgcctcctgcgatcttcacaccctttcctgcaggatgtaaacaaagaatgtaaacaatcgatgtaaacaagacatgtaaacaactaatgtaaacaaactatgtaaacaatgcatgtaaacaagtaatgtaaacaaggcgcgccatgcttcatcagactct

SEQ ID NO: 10341 - DNA, 172 bp, Artificial Sequence; identical to SEQ ID NO: 10340
  Synthetic polynucleotide

SEQ ID NO: 10342 - DNA, 172 bp, Artificial Sequence
  Synthetic polynucleotide
atcatctcaccttgcctcctgacgaagccaacttcgcgcctgcagggggggggtggagagggggggtggtcggggggggtgggacgggggggtggctagggggggtggactgggggggtggtgcgggggggtgggtagggggggtggggcgcgccatgcttcatcagactct

SEQ ID NO: 10343 - DNA, 172 bp, Artificial Sequence; identical to SEQ ID NO: 10342
  Synthetic polynucleotide

SEQ ID NO: 10344 - DNA, 191 bp, Artificial Sequence
  Synthetic polynucleotide
atcatctcaccttgcctcctgtacaaagctagcgcggtcctgcagggatattgacagctgcgtagagatattgacagctgcgttcggatattgacagctgcgtgacgatattgacagctgcgtctagatattgacagctgcgtactgatattgacagctgcgttgcggcgcgccatgcttcatcagactct

SEQ ID NO: 10345 - DNA, 191 bp, Artificial Sequence; identical to SEQ ID NO: 10344
  Synthetic polynucleotide

SEQ ID NO: 10346 - DNA, 164 bp, Artificial Sequence
  Synthetic polynucleotide
atcatctcaccttgcctcctgtatggacgccattgtggcctgcaggccttatatgagaccttatatgtcgccttatatggacccttatatgctaccttatatgactccttatatgtgcccttatatggtaccttatatgggcgcgccatgcttcatcagactct

SEQ ID NO: 10347 - DNA, 164 bp, Artificial Sequence; identical to SEQ ID NO: 10346
  Synthetic polynucleotide

SEQ ID NO: 10348 - DNA, 190 bp, Artificial Sequence
  Synthetic polynucleotide
atcatctcaccttgcctcctggacaggtcatgtttctgcctgcaggaggggaatttccccagaaggggaatttcccctcgaggggaatttccccgacaggggaatttccccctaaggggaatttccccactaggggaatttcccctgcaggggaatttccccgtaggcgcgccatgcttcatcagactct

SEQ ID NO: 10349 - DNA, 190 bp, Artificial Sequence; identical to SEQ ID NO: 10348
  Synthetic polynucleotide

SEQ ID NO: 10350 - DNA, 156 bp, Artificial Sequence
  Synthetic polynucleotide
atcatctcaccttgcctcctgttgtaaccctgtgtcgtcctgcaggtggaatgtagatggaatgttcgtggaatgtgactggaatgtctatggaatgtacttggaatgttgctggaatgtgtatggaatgtggcgcgccatgcttcatcagactct

SEQ ID NO: 10351 - DNA, 156 bp, Artificial Sequence; identical to SEQ ID NO: 10350
  Synthetic polynucleotide

SEQ ID NO: 10352 - DNA, 191 bp, Artificial Sequence
  Synthetic polynucleotide
atcatctcaccttgcctcctggtaacaatccatatacccctgcaggaatcatttccgggaaatgccaagaaatcatttccgggaaatgccatcgaatcatttccgggaaatgccagacaatcatttccgggaaatgccactaaatcatttccgggaaatgccaactggcgcgccatgcttcatcagactct

SEQ ID NO: 10353 - DNA, 191 bp, Artificial Sequence; identical to SEQ ID NO: 10352
  Synthetic polynucleotide

SEQ ID NO: 10354 - DNA, 188 bp, Artificial Sequence
  Synthetic polynucleotide
atcatctcaccttgcctcctgcatcagccggagttcaacctgcaggggtgacgtaaccagaggtgacgtaacctcgggtgacgtaaccgacggtgacgtaaccctaggtgacgtaaccactggtgacgtaacctgcggtgacgtaaccgtaggtgacgtaaccggcgcgccatgcttcatcagactct

SEQ ID NO: 10355 - DNA, 188 bp, Artificial Sequence; identical to SEQ ID NO: 10354
  Synthetic polynucleotide

SEQ ID NO: 10356 - DNA, 172 bp, Artificial Sequence
  Synthetic polynucleotide
atcatctcaccttgcctcctgcagaaatgggtattatgcctgcagggccatatggtagagccatatggttcggccatatggtgacgccatatggtctagccatatggtactgccatatggttgcgccatatggtgtagccatatggtggcgcgccatgcttcatcagactct

SEQ ID NO: 10357 - DNA, 172 bp, Artificial Sequence; identical to SEQ ID NO: 10356
  Synthetic polynucleotide

SEQ ID NO: 10358 - DNA, 191 bp, Artificial Sequence
  Synthetic polynucleotide
atcatctcaccttgcctcctgcgtggatttactccggccctgcaggggccaccagggggcgcccgagagaggccaccagggggcgcccgagtcgggccaccagggggcgcccgaggacggccaccagggggcgcccgagctaggccaccagggggcgcccgagactggcgcgccatgcttcatcagactct

SEQ ID NO: 10359 - DNA, 191 bp, Artificial Sequence; identical to SEQ ID NO: 10358
  Synthetic polynucleotide

SEQ ID NO: 10360 - DNA, 156 bp, Artificial Sequence
  Synthetic polynucleotide
atcatctcaccttgcctcctgaagggtctatgcataaacctgcaggggttgccaagaggttgccatcgggttgccagacggttgccactaggttgccaactggttgccatgcggttgccagtaggttgccaggcgcgccatgcttcatcagactct

SEQ ID NO: 10361 - DNA, 156 bp, Artificial Sequence; identical to SEQ ID NO: 10360
  Synthetic polynucleotide

SEQ ID NO: 10362 - DNA, 185 bp, Artificial Sequence
  Synthetic polynucleotide
atcatctcaccttgcctcctggatagcgacagtcaacgcctgcaggaattacctgtcaatacagaaattacctgtcaatactcgaattacctgtcaatacgacaattacctgtcaatacctaaattacctgtcaatacactaattacctgtcaatactgcggcgcgccatgcttcatcagactct

SEQ ID NO: 10363 - DNA, 185 bp, Artificial Sequence; identical to SEQ ID NO: 10362
  Synthetic polynucleotide

SEQ ID NO: 10364 - DNA, 156 bp, Artificial Sequence
  Synthetic polynucleotide
atcatctcaccttgcctcctgtctaggctttaccgcaacctgcaggcaataacaagacaataacatcgcaataacagaccaataacactacaataacaactcaataacatgccaataacagtacaataacaggcgcgccatgcttcatcagactct

SEQ ID NO: 10365 - DNA, 156 bp, Artificial Sequence; identical to SEQ ID NO: 10364
  Synthetic polynucleotide

SEQ ID NO: 10366 - DNA, 188 bp, Artificial Sequence
  Synthetic polynucleotide
atcatctcaccttgcctcctgagtctctaccttaagcgcctgcagggaaataattaccagagaaataattacctcggaaataattaccgacgaaataattaccctagaaataattaccactgaaataattacctgcgaaataattaccgtagaaataattaccggcgcgccatgcttcatcagactct

SEQ ID NO: 10367 - DNA, 188 bp, Artificial Sequence; identical to SEQ ID NO: 10366
  Synthetic polynucleotide

SEQ ID NO: 10368 - DNA, 188 bp, Artificial Sequence
  Synthetic polynucleotide
atcatctcaccttgcctcctgttctggatgcacgagatcctgcaggtgacacgtgggaagatgacacgtgggatcgtgacacgtgggagactgacacgtgggactatgacacgtgggaacttgacacgtgggatgctgacacgtgggagtatgacacgtgggaggcgcgccatgcttcatcagactct

SEQ ID NO: 10369 - DNA, 188 bp, Artificial Sequence; identical to SEQ ID NO: 10368
  Synthetic polynucleotide

SEQ ID NO: 10370 - DNA, 164 bp, Artificial Sequence
  Synthetic polynucleotide
atcatctcaccttgcctcctgcgtgggctttcaacctgcctgcaggttacgtcacagattacgtcactcgttacgtcacgacttacgtcacctattacgtcacactttacgtcactgcttacgtcacgtattacgtcacggcgcgccatgcttcatcagactct

SEQ ID NO: 10371 - DNA, 164 bp, Artificial Sequence; identical to SEQ ID NO: 10370
  Synthetic polynucleotide

SEQ ID NO: 10372 - DNA, 172 bp, Artificial Sequence
  Synthetic polynucleotide
atcatctcaccttgcctcctgtcctgactttgtgaaagcctgcaggaaccggaagtagaaaccggaagttcgaaccggaagtgacaaccggaagtctaaaccggaagtactaaccggaagttgcaaccggaagtgtaaaccggaagtggcgcgccatgcttcatcagactct

SEQ ID NO: 10373 - DNA, 172 bp, Artificial Sequence; identical to SEQ ID NO: 10372
  Synthetic polynucleotide

SEQ ID NO: 10374 - DNA, 164 bp, Artificial Sequence
  Synthetic polynucleotide
atcatctcaccttgcctcctggcgctttggcactttggcctgcaggtaaccggttagataaccggtttcgtaaccggttgactaaccggttctataaccggttacttaaccggtttgctaaccggttgtataaccggttggcgcgccatgcttcatcagactct

SEQ ID NO: 10375 - DNA, 164 bp, Artificial Sequence; identical to SEQ ID NO: 10374
  Synthetic polynucleotide

SEQ ID NO: 10376 - DNA, 148 bp, Artificial Sequence
  Synthetic polynucleotide
atcatctcaccttgcctcctgccatgttccggcaactgcctgcaggagaggaaagaagaggaatcgagaggaagacagaggaactaagaggaaactagaggaatgcagaggaagtaagaggaaggcgcgccatgcttcatcagactct

SEQ ID NO: 10377 - DNA, 148 bp, Artificial Sequence; identical to SEQ ID NO: 10376
  Synthetic polynucleotide

SEQ ID NO: 10378 - DNA, 186 bp, Artificial Sequence
  Synthetic polynucleotide
atcatctcaccttgcctcctgtacgtcgagtggagggacctgcagggtgaccttatgtaaggtcacagagtgaccttatgtaaggtcactcggtgaccttatgtaaggtcacgacgtgaccttatgtaaggtcacctagtgaccttatgtaaggtcacactggcgcgccatgcttcatcagactct

SEQ ID NO: 10379 - DNA, 186 bp, Artificial Sequence; identical to SEQ ID NO: 10378
  Synthetic polynucleotide

SEQ ID NO: 10380 - DNA, 196 bp, Artificial Sequence
  Synthetic polynucleotide
atcatctcaccttgcctcctgcacctggtgtcttcgtacctgcagggaaacctctggaaagagaaacctctggaatcggaaacctctggaagacgaaacctctggaactagaaacctctggaaactgaaacctctggaatgcgaaacctctggaagtagaaacctctggaaggcgcgccatgcttcatcagactct

SEQ ID NO: 10381 - DNA, 196 bp, Artificial Sequence; identical to SEQ ID NO: 10380
  Synthetic polynucleotide

SEQ ID NO: 10382 - DNA, 197 bp, Artificial Sequence
  Synthetic polynucleotide
atcatctcaccttgcctcctgacctggatgaaccgaaccctgcaggaagaggaagtgaaacagaaagaggaagtgaaactcgaagaggaagtgaaacgacaagaggaagtgaaacctaaagaggaagtgaaacactaagaggaagtgaaactgcaagaggaagtgaaacgtaggcgcgccatgcttcatcagactct

SEQ ID NO: 10383 - DNA, 197 bp, Artificial Sequence; identical to SEQ ID NO: 10382
  Synthetic polynucleotide

SEQ ID NO: 10384 - DNA, 185 bp, Artificial Sequence
  Synthetic polynucleotide
atcatctcaccttgcctcctgttgaatctatcgtgtgtcctgcaggttgtatgcaaattagaagattgtatgcaaattagatcgttgtatgcaaattagagacttgtatgcaaattagactattgtatgcaaattagaactttgtatgcaaattagatgcggcgcgccatgcttcatcagactct

SEQ ID NO: 10385 - DNA, 185 bp, Artificial Sequence; identical to SEQ ID NO: 10384
  Synthetic polynucleotide

SEQ ID NO: 10386 - DNA, 156 bp, Artificial Sequence
  Synthetic polynucleotide
atcatctcaccttgcctcctgtgaggtggcctatcctccctgcaggcatttcttagacatttctttcgcatttcttgaccatttcttctacatttcttactcatttctttgccatttcttgtacatttcttggcgcgccatgcttcatcagactct

SEQ ID NO: 10387 - DNA, 156 bp, Artificial Sequence; identical to SEQ ID NO: 10386
  Synthetic polynucleotide

SEQ ID NO: 10388 - DNA, 156 bp, Artificial Sequence
  Synthetic polynucleotide
atcatctcaccttgcctcctgaaactgactggaccggtcctgcaggaccgcccaagaaccgcccatcgaccgcccagacaccgcccactaaccgcccaactaccgcccatgcaccgcccagtaaccgcccaggcgcgccatgcttcatcagactct

SEQ ID NO: 10389 - DNA, 156 bp, Artificial Sequence; identical to SEQ ID NO: 10388
  Synthetic polynucleotide

SEQ ID NO: 10390 - DNA, 197 bp, Artificial Sequence
  Synthetic polynucleotide
atcatctcaccttgcctcctggcttatacaagccaatgcctgcaggacagattcttatctgagaacagattcttatctgtcgacagattcttatctggacacagattcttatctgctaacagattcttatctgactacagattcttatctgtgcacagattcttatctggtaggcgcgccatgcttcatcagactct

SEQ ID NO: 10391 - DNA, 197 bp, Artificial Sequence; identical to SEQ ID NO: 10390
  Synthetic polynucleotide

SEQ ID NO: 10392 - DNA, 197 bp, Artificial Sequence
  Synthetic polynucleotide
atcatctcaccttgcctcctgagaacagggactatgagcctgcaggtttgcataacaatggagatttgcataacaatggtcgtttgcataacaatgggactttgcataacaatggctatttgcataacaatggacttttgcataacaatggtgctttgcataacaatgggtaggcgcgccatgcttcatcagactct

SEQ ID NO: 10393 - DNA, 197 bp, Artificial Sequence; identical to SEQ ID NO: 10392
  Synthetic polynucleotide

SEQ ID NO: 10394 - DNA, 179 bp, Artificial Sequence
  Synthetic polynucleotide
atcatctcaccttgcctcctgaagacttacccgcagatcctgcaggtgttttgattgacaacaaaaggccagatgttttgattgacaacaaaaggcctcgtgttttgattgacaacaaaaggccgactgttttgattgacaacaaaaggccctaggcgcgccatgcttcatcagactct

SEQ ID NO: 10395 - DNA, 179 bp, Artificial Sequence; identical to SEQ ID NO: 10394
  Synthetic polynucleotide

SEQ ID NO: 10396 - DNA, 180 bp, Artificial Sequence
  Synthetic polynucleotide
atcatctcaccttgcctcctgccaggaccatgtttggccctgcagggaccagctgatagagaccagctgattcggaccagctgatgacgaccagctgatctagaccagctgatactgaccagctgattgcgaccagctgatgtagaccagctgatggcgcgccatgcttcatcagactct

SEQ ID NO: 10397 - DNA, 180 bp, Artificial Sequence; identical to SEQ ID NO: 10396
  Synthetic polynucleotide

SEQ ID NO: 10398 - DNA, 191 bp, Artificial Sequence
  Synthetic polynucleotide
atcatctcaccttgcctcctggtatattgtcgtagggacctgcaggcaccgctaattagcgttagacaccgctaattagcgtttcgcaccgctaattagcgttgaccaccgctaattagcgttctacaccgctaattagcgttactcaccgctaattagcgtttgcggcgcgccatgcttcatcagactct

SEQ ID NO: 10399 - DNA, 191 bp, Artificial Sequence; identical to SEQ ID NO: 10398
  Synthetic polynucleotide

SEQ ID NO: 10400 - DNA, 156 bp, Artificial Sequence
  Synthetic polynucleotide
atcatctcaccttgcctcctgaaccgaagtttcgccttcctgcagggcgccaaaagagcgccaaatcggcgccaaagacgcgccaaactagcgccaaaactgcgccaaatgcgcgccaaagtagcgccaaaggcgcgccatgcttcatcagactct

SEQ ID NO: 10401 - DNA, 156 bp, Artificial Sequence; identical to SEQ ID NO: 10400
  Synthetic polynucleotide

SEQ ID NO: 10402 - DNA, 197 bp, Artificial Sequence
  Synthetic polynucleotide
atcatctcaccttgcctcctgtgagtcccacacgcttccctgcaggatcactgcaattgatagaatcactgcaattgattcgatcactgcaattgatgacatcactgcaattgatctaatcactgcaattgatactatcactgcaattgattgcatcactgcaattgatgtaggcgcgccatgcttcatcagactct

SEQ ID NO: 10403 - DNA, 197 bp, Artificial Sequence; identical to SEQ ID NO: 10402
  Synthetic polynucleotide

SEQ ID NO: 10404 - DNA, 196 bp, Artificial Sequence
  Synthetic polynucleotide
atcatctcaccttgcctcctggccatgcataacaaatacctgcaggttgtttgctttgcagattgtttgctttgctcgttgtttgctttgcgacttgtttgctttgcctattgtttgctttgcactttgtttgctttgctgcttgtttgctttgcgtattgtttgctttgcggcgcgccatgcttcatcagactct

SEQ ID NO: 10405 - DNA, 196 bp, Artificial Sequence; identical to SEQ ID NO: 10404
  Synthetic polynucleotide

SEQ ID NO: 10406 - DNA, 197 bp, Artificial Sequence
  Synthetic polynucleotide
atcatctcaccttgcctcctgcagcatcatgggttaagcctgcagggtattttaattcctcagagtattttaattcctctcggtattttaattcctcgacgtattttaattcctcctagtattttaattcctcactgtattttaattcctctgcgtattttaattcctcgtaggcgcgccatgcttcatcagactct

SEQ ID NO: 10407 - DNA, 197 bp, Artificial Sequence; identical to SEQ ID NO: 10406
  Synthetic polynucleotide

SEQ ID NO: 10408 - DNA, 196 bp, Artificial Sequence
  Synthetic polynucleotide
atcatctcaccttgcctcctgatcctgctcagcagcctcctgcaggacctttgatttttagaacctttgattttttcgacctttgatttttgacacctttgatttttctaacctttgatttttactacctttgattttttgcacctttgatttttgtaacctttgatttttggcgcgccatgcttcatcagactct

SEQ ID NO: 10409 - DNA, 196 bp, Artificial Sequence; identical to SEQ ID NO: 10408
  Synthetic polynucleotide

SEQ ID NO: 10410 - DNA, 180 bp, Artificial Sequence
  Synthetic polynucleotide
atcatctcaccttgcctcctggctgttccaatttcttacctgcaggcaccatatggcagacaccatatggctcgcaccatatggcgaccaccatatggcctacaccatatggcactcaccatatggctgccaccatatggcgtacaccatatggcggcgcgccatgcttcatcagactct

SEQ ID NO: 10411 - DNA, 180 bp, Artificial Sequence; identical to SEQ ID NO: 10410
  Synthetic polynucleotide

SEQ ID NO: 10412 - DNA, 180 bp, Artificial Sequence
  Synthetic polynucleotide
atcatctcaccttgcctcctgcacaacagactgctcgtcctgcaggtaaccaatcacagataaccaatcactcgtaaccaatcacgactaaccaatcacctataaccaatcacacttaaccaatcactgctaaccaatcacgtataaccaatcacggcgcgccatgcttcatcagactct

SEQ ID NO: 10413 - DNA, 180 bp, Artificial Sequence; identical to SEQ ID NO: 10412
  Synthetic polynucleotide

SEQ ID NO: 10414 - DNA, 188 bp, Artificial Sequence
  Synthetic polynucleotide
atcatctcaccttgcctcctgccaaggcatgagacctccctgcaggtggaaagtccccagatggaaagtcccctcgtggaaagtccccgactggaaagtccccctatggaaagtccccacttggaaagtcccctgctggaaagtccccgtatggaaagtccccggcgcgccatgcttcatcagactct

SEQ ID NO: 10415 - DNA, 188 bp, Artificial Sequence; identical to SEQ ID NO: 10414
  Synthetic polynucleotide

SEQ ID NO: 10416 - DNA, 164 bp, Artificial Sequence
  Synthetic polynucleotide
atcatctcaccttgcctcctgggcctcgagaaattacccctgcaggccaggtggtagaccaggtggttcgccaggtggtgacccaggtggtctaccaggtggtactccaggtggttgcccaggtggtgtaccaggtggtggcgcgccatgcttcatcagactct

SEQ ID NO: 10417 - DNA, 164 bp, Artificial Sequence; identical to SEQ ID NO: 10416
  Synthetic polynucleotide

SEQ ID NO: 10418 - DNA, 191 bp, Artificial Sequence
  Synthetic polynucleotide
atcatctcaccttgcctcctgaacctcggcctgatgctcctgcaggcgcgttaattaattgtgagacgcgttaattaattgtgtcgcgcgttaattaattgtggaccgcgttaattaattgtgctacgcgttaattaattgtgactcgcgttaattaattgtgtgcggcgcgccatgcttcatcagactct

SEQ ID NO: 10419 - DNA, 191 bp, Artificial Sequence; identical to SEQ ID NO: 10418
  Synthetic polynucleotide

SEQ ID NO: 10420 - DNA, 172 bp, Artificial Sequence
  Synthetic polynucleotide
atcatctcaccttgcctcctgagccgtctggaggatagcctgcaggaaagtaaacaagaaaagtaaacatcgaaagtaaacagacaaagtaaacactaaaagtaaacaactaaagtaaacatgcaaagtaaacagtaaaagtaaacaggcgcgccatgcttcatcagactct

SEQ ID NO: 10421 - DNA, 172 bp, Artificial Sequence; identical to SEQ ID NO: 10420
  Synthetic polynucleotide

SEQ ID NO: 10422 - DNA, 191 bp, Artificial Sequence
  Synthetic polynucleotide
atcatctcaccttgcctcctggaaagctgcgaagtggtcctgcaggcgaattaattaatcaccagacgaattaattaatcacctcgcgaattaattaatcaccgaccgaattaattaatcaccctacgaattaattaatcaccactcgaattaattaatcacctgcggcgcgccatgcttcatcagactct

SEQ ID NO: 10423 - DNA, 191 bp, Artificial Sequence; identical to SEQ ID NO: 10422
  Synthetic polynucleotide

SEQ ID NO: 10424 - DNA, 185 bp, Artificial Sequence
  Synthetic polynucleotide
atcatctcaccttgcctcctgatccgatcgttgtttatcctgcaggaacaatgttcattgttagaaacaatgttcattgtttcgaacaatgttcattgttgacaacaatgttcattgttctaaacaatgttcattgttactaacaatgttcattgtttgcggcgcgccatgcttcatcagactct

SEQ ID NO: 10425 - DNA, 185 bp, Artificial Sequence; identical to SEQ ID NO: 10424
  Synthetic polynucleotide

SEQ ID NO: 10426 - DNA, 197 bp, Artificial Sequence
  Synthetic polynucleotide
atcatctcaccttgcctcctgtaaagtaccacgcgactcctgcagggttttggtttcgctttccagagttttggtttcgctttcctcggttttggtttcgctttccgacgttttggtttcgctttccctagttttggtttcgctttccactgttttggtttcgctttcctgcggcgcgccatgcttcatcagactct

SEQ ID NO: 10427 - DNA, 197 bp, Artificial Sequence; identical to SEQ ID NO: 10426
  Synthetic polynucleotide

SEQ ID NO: 10428 - DNA, 164 bp, Artificial Sequence
  Synthetic polynucleotide
atcatctcaccttgcctcctgcagacgacacctacaggcctgcaggaccggaagtagaaccggaagttcgaccggaagtgacaccggaagtctaaccggaagtactaccggaagttgcaccggaagtgtaaccggaagtggcgcgccatgcttcatcagactct

SEQ ID NO: 10429 - DNA, 164 bp, Artificial Sequence; identical to SEQ ID NO: 10428
  Synthetic polynucleotide

SEQ ID NO: 10430 - DNA, 180 bp, Artificial Sequence
  Synthetic polynucleotide
atcatctcaccttgcctcctgcatgtcggttcttctttcctgcaggttcttatctgtagattcttatctgttcgttcttatctgtgacttcttatctgtctattcttatctgtactttcttatctgttgcttcttatctgtgtattcttatctgtggcgcgccatgcttcatcagactct

SEQ ID NO: 10431 - DNA, 180 bp, Artificial Sequence; identical to SEQ ID NO: 10430
  Synthetic polynucleotide

SEQ ID NO: 10432 - DNA, 172 bp, Artificial Sequence
  Synthetic polynucleotide
atcatctcaccttgcctcctgattcaggttcgtcccaccctgcaggttccaggaaaagattccaggaaatcgttccaggaaagacttccaggaaactattccaggaaaactttccaggaaatgcttccaggaaagtattccaggaaaggcgcgccatgcttcatcagactct

SEQ ID NO: 10433 - DNA, 172 bp, Artificial Sequence; identical to SEQ ID NO: 10432
  Synthetic polynucleotide

SEQ ID NO: 10434 - DNA, 172 bp, Artificial Sequence
  Synthetic polynucleotide
atcatctcaccttgcctcctgacatcaggtgatactttcctgcagggtggaaaattagagtggaaaatttcggtggaaaattgacgtggaaaattctagtggaaaattactgtggaaaatttgcgtggaaaattgtagtggaaaattggcgcgccatgcttcatcagactct

SEQ ID NO: 10435 - DNA, 172 bp, Artificial Sequence; identical to SEQ ID NO: 10434
  Synthetic polynucleotide

SEQ ID NO: 10436 - DNA, 156 bp, Artificial Sequence
  Synthetic polynucleotide
atcatctcaccttgcctcctgttcagggacgtgttgggcctgcagggcccctttagagccccttttcggcccctttgacgcccctttctagcccctttactgccccttttgcgcccctttgtagcccctttggcgcgccatgcttcatcagactct

SEQ ID NO: 10437 - DNA, 156 bp, Artificial Sequence; identical to SEQ ID NO: 10436
  Synthetic polynucleotide

SEQ ID NO: 10438 - DNA, 172 bp, Artificial Sequence
  Synthetic polynucleotide
atcatctcaccttgcctcctggatttccgaaaccctggcctgcaggttccaggaagagattccaggaagtcgttccaggaaggacttccaggaagctattccaggaagactttccaggaagtgcttccaggaaggtattccaggaagggcgcgccatgcttcatcagactct

SEQ ID NO: 10439 - DNA, 172 bp, Artificial Sequence; identical to SEQ ID NO: 10438
  Synthetic polynucleotide

SEQ ID NO: 10440 - DNA, 156 bp, Artificial Sequence
  Synthetic polynucleotide
atcatctcaccttgcctcctgcattctaaaggtaccaacctgcagggctgcatgagagctgcatgtcggctgcatggacgctgcatgctagctgcatgactgctgcatgtgcgctgcatggtagctgcatgggcgcgccatgcttcatcagactct

SEQ ID NO: 10441 - DNA, 156 bp, Artificial Sequence; identical to SEQ ID NO: 10440
  Synthetic polynucleotide

SEQ ID NO: 10442 - DNA, 164 bp, Artificial Sequence
  Synthetic polynucleotide
atcatctcaccttgcctcctgccggattctatctcagccctgcaggaaacaaacaagaaaacaaacatcgaaacaaacagacaaacaaacactaaaacaaacaactaaacaaacatgcaaacaaacagtaaaacaaacaggcgcgccatgcttcatcagactct

SEQ ID NO: 10443 - DNA, 164 bp, Artificial Sequence; identical to SEQ ID NO: 10442
  Synthetic polynucleotide

SEQ ID NO: 10444 - DNA, 197 bp, Artificial Sequence
  Synthetic polynucleotide
atcatctcaccttgcctcctgaagcgggaaagcgatgccctgcaggccctgacctttgcccagaccctgacctttgccctcgccctgacctttgcccgacccctgacctttgcccctaccctgacctttgcccactccctgacctttgccctgcccctgacctttgcccgtaggcgcgccatgcttcatcagactct

SEQ ID NO: 10445 - DNA, 197 bp, Artificial Sequence; identical to SEQ ID NO: 10444
  Synthetic polynucleotide

SEQ ID NO: 10446 - DNA, 172 bp, Artificial Sequence
  Synthetic polynucleotide
atcatctcaccttgcctcctggatattgatcgcgatcccctgcaggaaccggaagcagaaaccggaagctcgaaccggaagcgacaaccggaagcctaaaccggaagcactaaccggaagctgcaaccggaagcgtaaaccggaagcggcgcgccatgcttcatcagactct

SEQ ID NO: 10447 - DNA, 172 bp, Artificial Sequence; identical to SEQ ID NO: 10446
  Synthetic polynucleotide

SEQ ID NO: 10448 - DNA, 190 bp, Artificial Sequence
  Synthetic polynucleotide
atcatctcaccttgcctcctgtactgctcctcgaataccctgcaggctaatattgctaaaagactaatattgctaaatcgctaatattgctaaagacctaatattgctaaactactaatattgctaaaactctaatattgctaaatgcctaatattgctaaagtaggcgcgccatgcttcatcagactct

SEQ ID NO: 10449 - DNA, 190 bp, Artificial Sequence; identical to SEQ ID NO: 10448
  Synthetic polynucleotide

SEQ ID NO: 10450 - DNA, 191 bp, Artificial Sequence
  Synthetic polynucleotide
atcatctcaccttgcctcctgcgtcaaacgagaaactgcctgcaggcgccatcttggatgagggcagagacgccatcttggatgagggcagtcgcgccatcttggatgagggcaggaccgccatcttggatgagggcagctacgccatcttggatgagggcagactggcgcgccatgcttcatcagactct

SEQ ID NO: 10451 - DNA, 191 bp, Artificial Sequence; identical to SEQ ID NO: 10450
  Synthetic polynucleotide

SEQ ID NO: 10452 - DNA, 172 bp, Artificial Sequence
  Synthetic polynucleotide
atcatctcaccttgcctcctgcgtcagacaagagaactcctgcaggaacggtagcaagaaacggtagcatcgaacggtagcagacaacggtagcactaaacggtagcaactaacggtagcatgcaacggtagcagtaaacggtagcaggcgcgccatgcttcatcagactct

SEQ ID NO: 10453 - DNA, 172 bp, Artificial Sequence; identical to SEQ ID NO: 10452
  Synthetic polynucleotide

SEQ ID NO: 10454 - DNA, 190 bp, Artificial Sequence
  Synthetic polynucleotide
atcatctcaccttgcctcctgtatgataagcacacctgcctgcaggttttcccgccaaaaagattttcccgccaaaatcgttttcccgccaaaagacttttcccgccaaaactattttcccgccaaaaactttttcccgccaaaatgcttttcccgccaaaagtaggcgcgccatgcttcatcagactct

SEQ ID NO: 10455 - DNA, 190 bp, Artificial Sequence; identical to SEQ ID NO: 10454
  Synthetic polynucleotide

SEQ ID NO: 10456 - DNA, 164 bp, Artificial Sequence
  Synthetic polynucleotide
atcatctcaccttgcctcctgatggcacctacgtcaggcctgcagggccctttgtagagccctttgttcggccctttgtgacgccctttgtctagccctttgtactgccctttgttgcgccctttgtgtagccctttgtggcgcgccatgcttcatcagactct

SEQ ID NO: 10457 - DNA, 164 bp, Artificial Sequence; identical to SEQ ID NO: 10456
  Synthetic polynucleotide

SEQ ID NO: 10458 - DNA, 197 bp, Artificial Sequence
  Synthetic polynucleotide
atcatctcaccttgcctcctgacaaacaaggctgaaatcctgcaggagtgggcggggccaaagaagtgggcggggccaatcgagtgggcggggccaagacagtgggcggggccaactaagtgggcggggccaaactagtgggcggggccaatgcagtgggcggggccaagtaggcgcgccatgcttcatcagactct

SEQ ID NO: 10459 - DNA, 197 bp, Artificial Sequence; identical to SEQ ID NO: 10458
  Synthetic polynucleotide

SEQ ID NO: 10460 - DNA, 197 bp, Artificial Sequence
  Synthetic polynucleotide
atcatctcaccttgcctcctgacttacaatcaggagtgcctgcagggtaattaacggtaattaaagagtaattaacggtaattaatcggtaattaacggtaattaagacgtaattaacggtaattaactagtaattaacggtaattaaactgtaattaacggtaattaatgcggcgcgccatgcttcatcagactct

SEQ ID NO: 10461 - DNA, 197 bp, Artificial Sequence; identical to SEQ ID NO: 10460
  Synthetic polynucleotide

SEQ ID NO: 10462 - DNA, 172 bp, Artificial Sequence
  Synthetic polynucleotide
atcatctcaccttgcctcctgttgggccattagaaatccctgcaggctaattagtaagactaattagtatcgctaattagtagacctaattagtactactaattagtaactctaattagtatgcctaattagtagtactaattagtaggcgcgccatgcttcatcagactct

SEQ ID NO: 10463 - DNA, 172 bp, Artificial Sequence; identical to SEQ ID NO: 10462
  Synthetic polynucleotide

SEQ ID NO: 10464 - DNA, 196 bp, Artificial Sequence
  Synthetic polynucleotide
atcatctcaccttgcctcctgtctgattgctgctgcaacctgcagggggggccttgaaaagagggggccttgaaatcggggggccttgaaagacgggggccttgaaactagggggccttgaaaactgggggccttgaaatgcgggggccttgaaagtagggggccttgaaaggcgcgccatgcttcatcagactct

SEQ ID NO: 10465 - DNA, 196 bp, Artificial Sequence; identical to SEQ ID NO: 10464
  Synthetic polynucleotide

SEQ ID NO: 10466 - DNA, 191 bp, Artificial Sequence
  Synthetic polynucleotide
atcatctcaccttgcctcctgtgcaagaactttctcagcctgcaggaaagggggcgtggcttaagaaaagggggcgtggcttatcgaaagggggcgtggcttagacaaagggggcgtggcttactaaaagggggcgtggcttaactaaagggggcgtggcttatgcggcgcgccatgcttcatcagactct

SEQ ID NO: 10467 - DNA, 191 bp, Artificial Sequence; identical to SEQ ID NO: 10466
  Synthetic polynucleotide

SEQ ID NO: 10468 - DNA, 191 bp, Artificial Sequence
  Synthetic polynucleotide
atcatctcaccttgcctcctgtctgaaagcactggagccctgcaggataagaacaaaggactaagaataagaacaaaggactatcgataagaacaaaggactagacataagaacaaaggactactaataagaacaaaggactaactataagaacaaaggactatgcggcgcgccatgcttcatcagactct

SEQ ID NO: 10469 - DNA, 191 bp, Artificial Sequence; identical to SEQ ID NO: 10468
  Synthetic polynucleotide

SEQ ID NO: 10470 - DNA, 172 bp, Artificial Sequence
  Synthetic polynucleotide
atcatctcaccttgcctcctgacacgctctcgcgtaaccctgcaggattgtgtccgagaattgtgtccgtcgattgtgtccggacattgtgtccgctaattgtgtccgactattgtgtccgtgcattgtgtccggtaattgtgtccgggcgcgccatgcttcatcagactct

SEQ ID NO: 10471 - DNA, 172 bp, Artificial Sequence; identical to SEQ ID NO: 10470
  Synthetic polynucleotide

SEQ ID NO: 10472 - DNA, 172 bp, Artificial Sequence
  Synthetic polynucleotide
atcatctcaccttgcctcctgaatcgttagatatagggcctgcaggcttgacctttagacttgaccttttcgcttgacctttgaccttgacctttctacttgacctttactcttgaccttttgccttgacctttgtacttgacctttggcgcgccatgcttcatcagactct

SEQ ID NO: 10473 - DNA, 172 bp, Artificial Sequence; identical to SEQ ID NO: 10472
  Synthetic polynucleotide

SEQ ID NO: 10474 - DNA, 180 bp, Artificial Sequence
  Synthetic polynucleotide
atcatctcaccttgcctcctgctccgcagctttaaccgcctgcagggggaaattcccagagggaaattccctcggggaaattcccgacgggaaattcccctagggaaattcccactgggaaattccctgcgggaaattcccgtagggaaattcccggcgcgccatgcttcatcagactct

SEQ ID NO: 10475 - DNA, 180 bp, Artificial Sequence; identical to SEQ ID NO: 10474
  Synthetic polynucleotide

SEQ ID NO: 10476 - DNA, 148 bp, Artificial Sequence
  Synthetic polynucleotide
atcatctcaccttgcctcctgtgcacgacgtgcctagtcctgcaggttgtaatagattgtaattcgttgtaatgacttgtaatctattgtaatactttgtaattgcttgtaatgtattgtaatggcgcgccatgcttcatcagactct

SEQ ID NO: 10477 - DNA, 148 bp, Artificial Sequence; identical to SEQ ID NO: 10476
  Synthetic polynucleotide

SEQ ID NO: 10478 - DNA, 191 bp, Artificial Sequence
  Synthetic polynucleotide
atcatctcaccttgcctcctgtaacacaactcacgtcacctgcaggataattgataccctattagaataattgataccctatttcgataattgataccctattgacataattgataccctattctaataattgataccctattactataattgataccctatttgcggcgcgccatgcttcatcagactct

SEQ ID NO: 10479 - DNA, 191 bp, Artificial Sequence; identical to SEQ ID NO: 10478
  Synthetic polynucleotide

SEQ ID NO: 10480 - DNA, 185 bp, Artificial Sequence
  Synthetic polynucleotide
atcatctcaccttgcctcctggcggccactcctcatttcctgcaggaggctaatccccaacgagaaggctaatccccaacgtcgaggctaatccccaacggacaggctaatccccaacgctaaggctaatccccaacgactaggctaatccccaacgtgcggcgcgccatgcttcatcagactct

SEQ ID NO: 10481 - DNA, 185 bp, Artificial Sequence; identical to SEQ ID NO: 10480
  Synthetic polynucleotide

SEQ ID NO: 10482 - DNA, 196 bp, Artificial Sequence
  Synthetic polynucleotide
atcatctcaccttgcctcctgagtgagataaccggagccctgcagggggaaagggagagagagggaaagggagagtcggggaaagggagaggacgggaaagggagagctagggaaagggagagactgggaaagggagagtgcgggaaagggagaggtagggaaagggagagggcgcgccatgcttcatcagactct

SEQ ID NO: 10483 - DNA, 196 bp, Artificial Sequence; identical to SEQ ID NO: 10482
  Synthetic polynucleotide

SEQ ID NO: 10484 - DNA, 191 bp, Artificial Sequence
  Synthetic polynucleotide
atcatctcaccttgcctcctgaaagaccgcaaccgagtcctgcaggtgctttctaggaattcaagatgctttctaggaattcatcgtgctttctaggaattcagactgctttctaggaattcactatgctttctaggaattcaacttgctttctaggaattcatgcggcgcgccatgcttcatcagactct

SEQ ID NO: 10485 - DNA, 191 bp, Artificial Sequence; identical to SEQ ID NO: 10484
  Synthetic polynucleotide

SEQ ID NO: 10486 - DNA, 156 bp, Artificial Sequence
  Synthetic polynucleotide
atcatctcaccttgcctcctgatagaacgcttcagttgcctgcaggcaacggccagacaacggcctcgcaacggccgaccaacggccctacaacggccactcaacggcctgccaacggccgtacaacggccggcgcgccatgcttcatcagactct

SEQ ID NO: 10487 - DNA, 156 bp, Artificial Sequence; identical to SEQ ID NO: 10486
  Synthetic polynucleotide

SEQ ID NO: 10488 - DNA, 190 bp, Artificial Sequence
  Synthetic polynucleotide
atcatctcaccttgcctcctgaatatcccagctaggcacctgcaggacagataagaatctagaacagataagaatcttcgacagataagaatctgacacagataagaatctctaacagataagaatctactacagataagaatcttgcacagataagaatctgtaggcgcgccatgcttcatcagactct

SEQ ID NO: 10489 - DNA, 190 bp, Artificial Sequence; identical to SEQ ID NO: 10488
  Synthetic polynucleotide

SEQ ID NO: 10490 - DNA, 180 bp, Artificial Sequence
  Synthetic polynucleotide
atcatctcaccttgcctcctgaaggttgcgttaagcgccctgcaggatgactcatccagaatgactcatcctcgatgactcatccgacatgactcatccctaatgactcatccactatgactcatcctgcatgactcatccgtaatgactcatccggcgcgccatgcttcatcagactct

SEQ ID NO: 10491 - DNA, 180 bp, Artificial Sequence; identical to SEQ ID NO: 10490
  Synthetic polynucleotide

SEQ ID NO: 10492 - DNA, 164 bp, Artificial Sequence
  Synthetic polynucleotide
atcatctcaccttgcctcctgcagtactccgaatttaacctgcaggcaccccctgagacaccccctgtcgcaccccctggaccaccccctgctacaccccctgactcaccccctgtgccaccccctggtacaccccctgggcgcgccatgcttcatcagactct

SEQ ID NO: 10493 - DNA, 164 bp, Artificial Sequence; identical to SEQ ID NO: 10492
  Synthetic polynucleotide

SEQ ID NO: 10494 - DNA, 164 bp, Artificial Sequence
  Synthetic polynucleotide
atcatctcaccttgcctcctgtctgagaagcgaatctccctgcaggtcgtaaacaagatcgtaaacatcgtcgtaaacagactcgtaaacactatcgtaaacaacttcgtaaacatgctcgtaaacagtatcgtaaacaggcgcgccatgcttcatcagactct

SEQ ID NO: 10495 - DNA, 164 bp, Artificial Sequence; identical to SEQ ID NO: 10494
  Synthetic polynucleotide

SEQ ID NO: 10496 - DNA, 197 bp, Artificial Sequence
  Synthetic polynucleotide
atcatctcaccttgcctcctgagctcaagtcagcacgtcctgcagggccataccctcctgcagagccataccctcctgctcggccataccctcctgcgacgccataccctcctgcctagccataccctcctgcactgccataccctcctgctgcgccataccctcctgcgtaggcgcgccatgcttcatcagactct

SEQ ID NO: 10497 - DNA, 197 bp, Artificial Sequence; identical to SEQ ID NO: 10496
  Synthetic polynucleotide

SEQ ID NO: 10498 - DNA, 197 bp, Artificial Sequence
  Synthetic polynucleotide
atcatctcaccttgcctcctgatggacaaggagagaaccctgcaggaaggtcatttcaaggtcaagaaaggtcatttcaaggtcatcgaaggtcatttcaaggtcagacaaggtcatttcaaggtcactaaaggtcatttcaaggtcaactaaggtcatttcaaggtcatgcggcgcgccatgcttcatcagactct

SEQ ID NO: 10499 - DNA, 197 bp, Artificial Sequence; identical to SEQ ID NO: 10498
  Synthetic polynucleotide

SEQ ID NO: 10500 - DNA, 197 bp, Artificial Sequence
  Synthetic polynucleotide
atcatctcaccttgcctcctgatccttcaagctggaggcctgcaggtggccaccagggggcagatggccaccagggggctcgtggccaccagggggcgactggccaccagggggcctatggccaccagggggcacttggccaccagggggctgctggccaccagggggcgtaggcgcgccatgcttcatcagactct

SEQ ID NO: 10501 - DNA, 197 bp, Artificial Sequence; identical to SEQ ID NO: 10500
  Synthetic polynucleotide

SEQ ID NO: 10502 - DNA, 179 bp, Artificial Sequence
  Synthetic polynucleotide
atcatctcaccttgcctcctgaatgggatccgtacactcctgcaggggcatatgctgtgatttattttttagaggcatatgctgtgatttatttttttcgggcatatgctgtgatttattttttgacggcatatgctgtgatttattttttctaggcgcgccatgcttcatcagactct

SEQ ID NO: 10503 - DNA, 179 bp, Artificial Sequence; identical to SEQ ID NO: 10502
  Synthetic polynucleotide

SEQ ID NO: 10504 - DNA, 172 bp, Artificial Sequence
  Synthetic polynucleotide
atcatctcaccttgcctcctgtatgctgaaattaagcccctgcaggccacttccggagaccacttccggtcgccacttccgggacccacttccggctaccacttccggactccacttccggtgcccacttccgggtaccacttccggggcgcgccatgcttcatcagactct

SEQ ID NO: 10505 - DNA, 172 bp, Artificial Sequence; identical to SEQ ID NO: 10504
  Synthetic polynucleotide

SEQ ID NO: 10506 - DNA, 172 bp, Artificial Sequence
  Synthetic polynucleotide
atcatctcaccttgcctcctggaacaccctcgggcattcctgcaggattattaataagaattattaatatcgattattaatagacattattaatactaattattaataactattattaatatgcattattaatagtaattattaataggcgcgccatgcttcatcagactct

SEQ ID NO: 10507 - DNA, 172 bp, Artificial Sequence; identical to SEQ ID NO: 10506
  Synthetic polynucleotide

SEQ ID NO: 10508 - DNA, 156 bp, Artificial Sequence
  Synthetic polynucleotide
atcatctcaccttgcctcctgttcctcatccaaagccgcctgcaggcggaaatcagacggaaatctcgcggaaatcgaccggaaatcctacggaaatcactcggaaatctgccggaaatcgtacggaaatcggcgcgccatgcttcatcagactct

SEQ ID NO: 10509 - DNA, 156 bp, Artificial Sequence; identical to SEQ ID NO: 10508
  Synthetic polynucleotide

SEQ ID NO: 10510 - DNA, 188 bp, Artificial Sequence
  Synthetic polynucleotide
atcatctcaccttgcctcctgtgttgaaatatctcaggcctgcaggaaatgacagctcagaaaatgacagctctcgaaatgacagctcgacaaatgacagctcctaaaatgacagctcactaaatgacagctctgcaaatgacagctcgtaaaatgacagctcggcgcgccatgcttcatcagactct

SEQ ID NO: 10511 - DNA, 188 bp, Artificial Sequence; identical to SEQ ID NO: 10510
  Synthetic polynucleotide

SEQ ID NO: 10512 - DNA, 164 bp, Artificial Sequence
  Synthetic polynucleotide
atcatctcaccttgcctcctggttggaccaaaggtcctcctgcaggacaagataaagaacaagataatcgacaagataagacacaagataactaacaagataaactacaagataatgcacaagataagtaacaagataaggcgcgccatgcttcatcagactct

SEQ ID NO: 10513 - DNA, 164 bp, Artificial Sequence; identical to SEQ ID NO: 10512
  Synthetic polynucleotide

SEQ ID NO: 10514 - DNA, 191 bp, Artificial Sequence
  Synthetic polynucleotide
atcatctcaccttgcctcctgatgtgtagatccgaaagcctgcaggttgttgccaggctactaagattgttgccaggctactatcgttgttgccaggctactagacttgttgccaggctactactattgttgccaggctactaactttgttgccaggctactatgcggcgcgccatgcttcatcagactct

SEQ ID NO: 10515 - DNA, 191 bp, Artificial Sequence; identical to SEQ ID NO: 10514
  Synthetic polynucleotide

SEQ ID NO: 10516 - DNA, 191 bp, Artificial Sequence
  Synthetic polynucleotide
atcatctcaccttgcctcctgaagattgcaaatcggtgcctgcaggcccatttcccggaaatcccatagacccatttcccggaaatcccattcgcccatttcccggaaatcccatgaccccatttcccggaaatcccatctacccatttcccggaaatcccatactggcgcgccatgcttcatcagactct

SEQ ID NO: 10517 - DNA, 191 bp, Artificial Sequence; identical to SEQ ID NO: 10516
  Synthetic polynucleotide

SEQ ID NO: 10518 - DNA, 148 bp, Artificial Sequence
  Synthetic polynucleotide
atcatctcaccttgcctcctggcctcccagtacatgagcctgcaggccacgtgagaccacgtgtcgccacgtggacccacgtgctaccacgtgactccacgtgtgcccacgtggtaccacgtgggcgcgccatgcttcatcagactct

SEQ ID NO: 10519 - DNA, 148 bp, Artificial Sequence; identical to SEQ ID NO: 10518
  Synthetic polynucleotide

SEQ ID NO: 10520 - DNA, 156 bp, Artificial Sequence
  Synthetic polynucleotide
atcatctcaccttgcctcctgcttcagtcaggccgaaccctgcaggcggaaatgagacggaaatgtcgcggaaatggaccggaaatgctacggaaatgactcggaaatgtgccggaaatggtacggaaatgggcgcgccatgcttcatcagactct

SEQ ID NO: 10521 - DNA, 156 bp, Artificial Sequence; identical to SEQ ID NO: 10520
  Synthetic polynucleotide

SEQ ID NO: 10522 - DNA, 197 bp, Artificial Sequence
  Synthetic polynucleotide
atcatctcaccttgcctcctgagtgatcccactggaaccctgcaggaacaattgcattgttagaaacaattgcattgtttcgaacaattgcattgttgacaacaattgcattgttctaaacaattgcattgttactaacaattgcattgtttgcaacaattgcattgttgtaggcgcgccatgcttcatcagactct

SEQ ID NO: 10523 - DNA, 197 bp, Artificial Sequence; identical to SEQ ID NO: 10522
  Synthetic polynucleotide

SEQ ID NO: 10524 - DNA, 200 bp, Artificial Sequence
  Synthetic polynucleotide
atcatctcaccttgcctcctgaccactcatacggtaaccctgcagggtgaccttattaaggtcacagagtgaccttattaaggtcactcggtgaccttattaaggtcacgacgtgaccttattaaggtcacctagtgaccttattaaggtcacactgtgaccttattaaggtcacggcgcgccatgcttcatcagactct

SEQ ID NO: 10525 - DNA, 200 bp, Artificial Sequence; identical to SEQ ID NO: 10524
  Synthetic polynucleotide

SEQ ID NO: 10526 - DNA, 172 bp, Artificial Sequence
  Synthetic polynucleotide
atcatctcaccttgcctcctgtgatgtcgtctcttacccctgcaggtttttacgacagatttttacgactcgtttttacgacgactttttacgacctatttttacgacacttttttacgactgctttttacgacgtatttttacgacggcgcgccatgcttcatcagactct

SEQ ID NO: 10527 - DNA, 172 bp, Artificial Sequence; identical to SEQ ID NO: 10526
  Synthetic polynucleotide

SEQ ID NO: 10528 - DNA, 172 bp, Artificial Sequence
  Synthetic polynucleotide
atcatctcaccttgcctcctgcgtcatgggtcagaacacctgcaggttaagtggttagattaagtggtttcgttaagtggttgacttaagtggttctattaagtggttactttaagtggtttgcttaagtggttgtattaagtggttggcgcgccatgcttcatcagactct

SEQ ID NO: 10529 - DNA, 172 bp, Artificial Sequence; identical to SEQ ID NO: 10528
  Synthetic polynucleotide

SEQ ID NO: 10530 - DNA, 180 bp, Artificial Sequence
  Synthetic polynucleotide
atcatctcaccttgcctcctggagtgcatttaagtagtcctgcaggtgtttgcttaaagatgtttgcttaatcgtgtttgcttaagactgtttgcttaactatgtttgcttaaacttgtttgcttaatgctgtttgcttaagtatgtttgcttaaggcgcgccatgcttcatcagactct

SEQ ID NO: 10531 - DNA, 180 bp, Artificial Sequence; identical to SEQ ID NO: 10530
  Synthetic polynucleotide

SEQ ID NO: 10532 - DNA, 180 bp, Artificial Sequence
  Synthetic polynucleotide
atcatctcaccttgcctcctgccgcattgagaaagtaacctgcaggggatatcattcagaggatatcattctcgggatatcattcgacggatatcattcctaggatatcattcactggatatcattctgcggatatcattcgtaggatatcattcggcgcgccatgcttcatcagactct

SEQ ID NO: 10533 - DNA, 180 bp, Artificial Sequence; identical to SEQ ID NO: 10532
  Synthetic polynucleotide

SEQ ID NO: 10534 - DNA, 185 bp, Artificial Sequence
  Synthetic polynucleotide
atcatctcaccttgcctcctgcatccaccggtcctaagcctgcaggcgttaccatggcaacgagacgttaccatggcaacgtcgcgttaccatggcaacggaccgttaccatggcaacgctacgttaccatggcaacgactcgttaccatggcaacgtgcggcgcgccatgcttcatcagactct

SEQ ID NO: 10535 - DNA, 185 bp, Artificial Sequence; identical to SEQ ID NO: 10534
  Synthetic polynucleotide

SEQ ID NO: 10536 - DNA, 197 bp, Artificial Sequence
  Synthetic polynucleotide
atcatctcaccttgcctcctgatcaactccacgaggctcctgcaggggccaccagggggcgagaggccaccagggggcgtcgggccaccagggggcggacggccaccagggggcgctaggccaccagggggcgactggccaccagggggcgtgcggccaccagggggcggtaggcgcgccatgcttcatcagactct

SEQ ID NO: 10537 - DNA, 197 bp, Artificial Sequence; identical to SEQ ID NO: 10536
  Synthetic polynucleotide

SEQ ID NO: 10538 - DNA, 172 bp, Artificial Sequence
  Synthetic polynucleotide
atcatctcaccttgcctcctgatatcacgtatggaccgcctgcaggtacccgcataagatacccgcatatcgtacccgcatagactacccgcatactatacccgcataacttacccgcatatgctacccgcatagtatacccgcataggcgcgccatgcttcatcagactct

SEQ ID NO: 10539 - DNA, 172 bp, Artificial Sequence; identical to SEQ ID NO: 10538
  Synthetic polynucleotide

SEQ ID NO: 10540 - DNA, 185 bp, Artificial Sequence
  Synthetic polynucleotide
atcatctcaccttgcctcctgatgggttgatcgacgcacctgcaggatttacgacaaatagcagaatttacgacaaatagctcgatttacgacaaatagcgacatttacgacaaatagcctaatttacgacaaatagcactatttacgacaaatagctgcggcgcgccatgcttcatcagactct

SEQ ID NO: 10541 - DNA, 185 bp, Artificial Sequence; identical to SEQ ID NO: 10540
  Synthetic polynucleotide

SEQ ID NO: 10542 - DNA, 185 bp, Artificial Sequence
  Synthetic polynucleotide
atcatctcaccttgcctcctgtaggtctcgccgtctaacctgcaggtaagccacttaacattagataagccacttaacatttcgtaagccacttaacattgactaagccacttaacattctataagccacttaacattacttaagccacttaacatttgcggcgcgccatgcttcatcagactct

SEQ ID NO: 10543 - DNA, 185 bp, Artificial Sequence; identical to SEQ ID NO: 10542
  Synthetic polynucleotide

SEQ ID NO: 10544 - DNA, 191 bp, Artificial Sequence
  Synthetic polynucleotide
atcatctcaccttgcctcctggatagagaatccgtatacctgcaggcgaaggctgcggggtcagcacagacgaaggctgcggggtcagcactcgcgaaggctgcggggtcagcacgaccgaaggctgcggggtcagcacctacgaaggctgcggggtcagcacactggcgcgccatgcttcatcagactct

SEQ ID NO: 10545 - DNA, 191 bp, Artificial Sequence; identical to SEQ ID NO: 10544
  Synthetic polynucleotide

SEQ ID NO: 10546 - DNA, 164 bp, Artificial Sequence
  Synthetic polynucleotide
atcatctcaccttgcctcctgacccgtatttacctcttcctgcaggacctgtcatagaacctgtcattcgacctgtcatgacacctgtcatctaacctgtcatactacctgtcattgcacctgtcatgtaacctgtcatggcgcgccatgcttcatcagactct

SEQ ID NO: 10547 - DNA, 164 bp, Artificial Sequence; identical to SEQ ID NO: 10546
  Synthetic polynucleotide

SEQ ID NO: 10548 - DNA, 164 bp, Artificial Sequence
  Synthetic polynucleotide
atcatctcaccttgcctcctgctctacagttgttcatacctgcaggtttcgaacgagatttcgaacgtcgtttcgaacggactttcgaacgctatttcgaacgacttttcgaacgtgctttcgaacggtatttcgaacgggcgcgccatgcttcatcagactct

SEQ ID NO: 10549 - DNA, 164 bp, Artificial Sequence; identical to SEQ ID NO: 10548
  Synthetic polynucleotide

SEQ ID NO: 10550 - DNA, 172 bp, Artificial Sequence
  Synthetic polynucleotide
atcatctcaccttgcctcctgcagcctttcgtgagaggcctgcaggtacccgcatgagatacccgcatgtcgtacccgcatggactacccgcatgctatacccgcatgacttacccgcatgtgctacccgcatggtatacccgcatgggcgcgccatgcttcatcagactct

SEQ ID NO: 10551 - DNA, 172 bp, Artificial Sequence; identical to SEQ ID NO: 10550
  Synthetic polynucleotide

SEQ ID NO: 10552 - DNA, 172 bp, Artificial Sequence
  Synthetic polynucleotide
atcatctcaccttgcctcctgggaagagtttgatgtagcctgcaggtcacgtggttagatcacgtggtttcgtcacgtggttgactcacgtggttctatcacgtggttacttcacgtggtttgctcacgtggttgtatcacgtggttggcgcgccatgcttcatcagactct

SEQ ID NO: 10553 - DNA, 172 bp, Artificial Sequence; identical to SEQ ID NO: 10552
  Synthetic polynucleotide

SEQ ID NO: 10554 - DNA, 172 bp, Artificial Sequence
  Synthetic polynucleotide
atcatctcaccttgcctcctgttcatatgcagtgcgcacctgcaggcctggtgctgagacctggtgctgtcgcctggtgctggaccctggtgctgctacctggtgctgactcctggtgctgtgccctggtgctggtacctggtgctgggcgcgccatgcttcatcagactct

SEQ ID NO: 10555 - DNA, 172 bp, Artificial Sequence; identical to SEQ ID NO: 10554
  Synthetic polynucleotide

SEQ ID NO: 10556 - DNA, 197 bp, Artificial Sequence
  Synthetic polynucleotide
atcatctcaccttgcctcctgatcaaggtagcgtcgcccctgcaggtcatactggagagaaagatcatactggagagaatcgtcatactggagagaagactcatactggagagaactatcatactggagagaaacttcatactggagagaatgctcatactggagagaagtaggcgcgccatgcttcatcagactct

SEQ ID NO: 10557 - DNA, 197 bp, Artificial Sequence; identical to SEQ ID NO: 10556
  Synthetic polynucleotide

SEQ ID NO: 10558 - DNA, 196 bp, Artificial Sequence
  Synthetic polynucleotide
atcatctcaccttgcctcctgcagaccggtgaacgaaccctgcaggtttacccacaatgcattgcgccagatttacccacaatgcattgcgcctcgtttacccacaatgcattgcgccgactttacccacaatgcattgcgccctatttacccacaatgcattgcgccactggcgcgccatgcttcatcagactct

SEQ ID NO: 10559 - DNA, 196 bp, Artificial Sequence; identical to SEQ ID NO: 10558
  Synthetic polynucleotide

SEQ ID NO: 10560 - DNA, 180 bp, Artificial Sequence
  Synthetic polynucleotide
atcatctcaccttgcctcctgcaccggtaagccgaaaccctgcaggtaattagattaagataattagattatcgtaattagattagactaattagattactataattagattaacttaattagattatgctaattagattagtataattagattaggcgcgccatgcttcatcagactct

SEQ ID NO: 10561 - DNA, 180 bp, Artificial Sequence; identical to SEQ ID NO: 10560
  Synthetic polynucleotide

SEQ ID NO: 10562 - DNA, 185 bp, Artificial Sequence
  Synthetic polynucleotide
atcatctcaccttgcctcctgtagttagacgatgtaggcctgcaggcgaattttatggctccagacgaattttatggctcctcgcgaattttatggctccgaccgaattttatggctccctacgaattttatggctccactcgaattttatggctcctgcggcgcgccatgcttcatcagactct

SEQ ID NO: 10563 - DNA, 185 bp, Artificial Sequence; identical to SEQ ID NO: 10562
  Synthetic polynucleotide

SEQ ID NO: 10564 - DNA, 156 bp, Artificial Sequence
  Synthetic polynucleotide
atcatctcaccttgcctcctggaagagaaagcattcctcctgcaggtgatacccagatgataccctcgtgatacccgactgatacccctatgatacccacttgataccctgctgatacccgtatgatacccggcgcgccatgcttcatcagactct

SEQ ID NO: 10565 - DNA, 156 bp, Artificial Sequence; identical to SEQ ID NO: 10564
  Synthetic polynucleotide

SEQ ID NO: 10566 - DNA, 185 bp, Artificial Sequence
  Synthetic polynucleotide
atcatctcaccttgcctcctgctggaggaataatcccacctgcagggcagaaagaagtaacaagagcagaaagaagtaacatcggcagaaagaagtaacagacgcagaaagaagtaacactagcagaaagaagtaacaactgcagaaagaagtaacatgcggcgcgccatgcttcatcagactct

SEQ ID NO: 10567 - DNA, 185 bp, Artificial Sequence; identical to SEQ ID NO: 10566
  Synthetic polynucleotide

SEQ ID NO: 10568 - DNA, 172 bp, Artificial Sequence
  Synthetic polynucleotide
atcatctcaccttgcctcctgtttacatgccacggtagcctgcaggcgcttccggcagacgcttccggctcgcgcttccggcgaccgcttccggcctacgcttccggcactcgcttccggctgccgcttccggcgtacgcttccggcggcgcgccatgcttcatcagactct

SEQ ID NO: 10569 - DNA, 172 bp, Artificial Sequence; identical to SEQ ID NO: 10568
  Synthetic polynucleotide

SEQ ID NO: 10570 - DNA, 156 bp, Artificial Sequence
  Synthetic polynucleotide
atcatctcaccttgcctcctgtgcgtcgcaatgggtaacctgcaggtcccgctcagatcccgctctcgtcccgctcgactcccgctcctatcccgctcacttcccgctctgctcccgctcgtatcccgctcggcgcgccatgcttcatcagactct

SEQ ID NO: 10571 - DNA, 156 bp, Artificial Sequence; identical to SEQ ID NO: 10570
  Synthetic polynucleotide

SEQ ID NO: 10572 - DNA, 180 bp, Artificial Sequence
  Synthetic polynucleotide
atcatctcaccttgcctcctggtgagctgtgtccgagacctgcaggtttttattgctagatttttattgcttcgtttttattgctgactttttattgctctatttttattgctacttttttattgcttgctttttattgctgtatttttattgctggcgcgccatgcttcatcagactct

SEQ ID NO: 10573 - DNA, 180 bp, Artificial Sequence; identical to SEQ ID NO: 10572
  Synthetic polynucleotide

SEQ ID NO: 10574 - DNA, 188 bp, Artificial Sequence
  Synthetic polynucleotide
atcatctcaccttgcctcctgagagaaacggcttaagccctgcaggaatgggcgtggcagaaatgggcgtggctcgaatgggcgtggcgacaatgggcgtggcctaaatgggcgtggcactaatgggcgtggctgcaatgggcgtggcgtaaatgggcgtggcggcgcgccatgcttcatcagactct

SEQ ID NO: 10575 - DNA, 188 bp, Artificial Sequence; identical to SEQ ID NO: 10574
  Synthetic polynucleotide

SEQ ID NO: 10576 - DNA, 164 bp, Artificial Sequence
  Synthetic polynucleotide
atcatctcaccttgcctcctggttcttgtccgtgccttcctgcaggacctgtcaaagaacctgtcaatcgacctgtcaagacacctgtcaactaacctgtcaaactacctgtcaatgcacctgtcaagtaacctgtcaaggcgcgccatgcttcatcagactct

SEQ ID NO: 10577 - DNA, 164 bp, Artificial Sequence; identical to SEQ ID NO: 10576
  Synthetic polynucleotide

SEQ ID NO: 10578 - DNA, 164 bp, Artificial Sequence
  Synthetic polynucleotide
atcatctcaccttgcctcctggttctggcaagcaactgcctgcaggccaggtgcaagaccaggtgcatcgccaggtgcagacccaggtgcactaccaggtgcaactccaggtgcatgcccaggtgcagtaccaggtgcaggcgcgccatgcttcatcagactct

SEQ ID NO: 10579 - DNA, 164 bp, Artificial Sequence; identical to SEQ ID NO: 10578
  Synthetic polynucleotide

SEQ ID NO: 10580 - DNA, 191 bp, Artificial Sequence
  Synthetic polynucleotide
atcatctcaccttgcctcctgctgcaggtcctacacagcctgcaggtaaactaattagctttgagataaactaattagctttgtcgtaaactaattagctttggactaaactaattagctttgctataaactaattagctttgacttaaactaattagctttgtgcggcgcgccatgcttcatcagactct

SEQ ID NO: 10581 - DNA, 191 bp, Artificial Sequence; identical to SEQ ID NO: 10580
  Synthetic polynucleotide

SEQ ID NO: 10582 - DNA, 172 bp, Artificial Sequence
  Synthetic polynucleotide
atcatctcaccttgcctcctgctttacctaaggctctgcctgcaggatatgcaaatagaatatgcaaattcgatatgcaaatgacatatgcaaatctaatatgcaaatactatatgcaaattgcatatgcaaatgtaatatgcaaatggcgcgccatgcttcatcagactct

SEQ ID NO: 10583 - DNA, 172 bp, Artificial Sequence; identical to SEQ ID NO: 10582
  Synthetic polynucleotide

SEQ ID NO: 10584 - DNA, 172 bp, Artificial Sequence
  Synthetic polynucleotide
atcatctcaccttgcctcctgaaccagaagactacacgcctgcaggttatttcctgagattatttcctgtcgttatttcctggacttatttcctgctattatttcctgactttatttcctgtgcttatttcctggtattatttcctgggcgcgccatgcttcatcagactct

SEQ ID NO: 10585 - DNA, 172 bp, Artificial Sequence; identical to SEQ ID NO: 10584
  Synthetic polynucleotide

SEQ ID NO: 10586 - DNA, 164 bp, Artificial Sequence
  Synthetic polynucleotide
atcatctcaccttgcctcctgacctttagctgaagtcgcctgcaggttccccaccagattccccacctcgttccccaccgacttccccaccctattccccaccactttccccacctgcttccccaccgtattccccaccggcgcgccatgcttcatcagactct

SEQ ID NO: 10587 - DNA, 164 bp, Artificial Sequence; identical to SEQ ID NO: 10586
  Synthetic polynucleotide

SEQ ID NO: 10588 - DNA, 172 bp, Artificial Sequence
  Synthetic polynucleotide
atcatctcaccttgcctcctgatgtaggagggatcgatcctgcaggcgcccacgtcagacgcccacgtctcgcgcccacgtcgaccgcccacgtcctacgcccacgtcactcgcccacgtctgccgcccacgtcgtacgcccacgtcggcgcgccatgcttcatcagactct

SEQ ID NO: 10589 - DNA, 172 bp, Artificial Sequence; identical to SEQ ID NO: 10588
  Synthetic polynucleotide

SEQ ID NO: 10590 - DNA, 172 bp, Artificial Sequence
  Synthetic polynucleotide
atcatctcaccttgcctcctgctagtagacgttgtgtgcctgcaggacacttgagtagaacacttgagttcgacacttgagtgacacacttgagtctaacacttgagtactacacttgagttgcacacttgagtgtaacacttgagtggcgcgccatgcttcatcagactct

SEQ ID NO: 10591 - DNA, 172 bp, Artificial Sequence; identical to SEQ ID NO: 10590
  Synthetic polynucleotide

SEQ ID NO: 10592 - DNA, 156 bp, Artificial Sequence
  Synthetic polynucleotide
atcatctcaccttgcctcctggctcttagatcaatcatcctgcaggaaattcctagaaaattccttcgaaattcctgacaaattcctctaaaattcctactaaattccttgcaaattcctgtaaaattcctggcgcgccatgcttcatcagactct

SEQ ID NO: 10593 - DNA, 156 bp, Artificial Sequence; identical to SEQ ID NO: 10592
  Synthetic polynucleotide

SEQ ID NO: 10594 - DNA, 172 bp, Artificial Sequence
  Synthetic polynucleotide
atcatctcaccttgcctcctgaggtcctgtggagtgaccctgcagggcttatctttagagcttatcttttcggcttatctttgacgcttatctttctagcttatctttactgcttatcttttgcgcttatctttgtagcttatctttggcgcgccatgcttcatcagactct

SEQ ID NO: 10595 - DNA, 172 bp, Artificial Sequence; identical to SEQ ID NO: 10594
  Synthetic polynucleotide

SEQ ID NO: 10596 - DNA, 156 bp, Artificial Sequence
  Synthetic polynucleotide
atcatctcaccttgcctcctgaagagggcatagcaacccctgcaggtaataaaaagataataaaatcgtaataaaagactaataaaactataataaaaacttaataaaatgctaataaaagtataataaaaggcgcgccatgcttcatcagactct

SEQ ID NO: 10597 - DNA, 156 bp, Artificial Sequence; identical to SEQ ID NO: 10596
  Synthetic polynucleotide

SEQ ID NO: 10598 - DNA, 191 bp, Artificial Sequence
  Synthetic polynucleotide
atcatctcaccttgcctcctgacggtggctactatttacctgcaggaatggggtatcacttttagaaatggggtatcactttttcgaatggggtatcacttttgacaatggggtatcacttttctaaatggggtatcacttttactaatggggtatcactttttgcggcgcgccatgcttcatcagactct

SEQ ID NO: 10599 - DNA, 191 bp, Artificial Sequence; identical to SEQ ID NO: 10598
  Synthetic polynucleotide

SEQ ID NO: 10600 - DNA, 191 bp, Artificial Sequence
  Synthetic polynucleotide
atcatctcaccttgcctcctgcttgcgatactgctattcctgcaggttggatacttgccaagaagattggatacttgccaagatcgttggatacttgccaagagacttggatacttgccaagactattggatacttgccaagaactttggatacttgccaagatgcggcgcgccatgcttcatcagactct

SEQ ID NO: 10601 - DNA, 191 bp, Artificial Sequence; identical to SEQ ID NO: 10600
  Synthetic polynucleotide

SEQ ID NO: 10602 - DNA, 156 bp, Artificial Sequence
  Synthetic polynucleotide
atcatctcaccttgcctcctgccctatgaagacttccacctgcaggctcaagtgagactcaagtgtcgctcaagtggacctcaagtgctactcaagtgactctcaagtgtgcctcaagtggtactcaagtgggcgcgccatgcttcatcagactct

SEQ ID NO: 10603 - DNA, 156 bp, Artificial Sequence; identical to SEQ ID NO: 10602
  Synthetic polynucleotide

SEQ ID NO: 10604 - DNA, 164 bp, Artificial Sequence
  Synthetic polynucleotide
atcatctcaccttgcctcctgacaaatgtcctcgattacctgcaggtggaaaattagatggaaaatttcgtggaaaattgactggaaaattctatggaaaattacttggaaaatttgctggaaaattgtatggaaaattggcgcgccatgcttcatcagactct

SEQ ID NO: 10605 - DNA, 164 bp, Artificial Sequence; identical to SEQ ID NO: 10604
  Synthetic polynucleotide

SEQ ID NO: 10606 - DNA, 156 bp, Artificial Sequence
  Synthetic polynucleotide
atcatctcaccttgcctcctggatatgtcgaatccgttcctgcaggttcaaaggagattcaaaggtcgttcaaagggacttcaaaggctattcaaaggactttcaaaggtgcttcaaagggtattcaaaggggcgcgccatgcttcatcagactct

SEQ ID NO: 10607 - DNA, 156 bp, Artificial Sequence; identical to SEQ ID NO: 10606
  Synthetic polynucleotide

SEQ ID NO: 10608 - DNA, 197 bp, Artificial Sequence
  Synthetic polynucleotide
atcatctcaccttgcctcctgacgacatacgcaacaatcctgcaggatgatttattactttagaatgatttattacttttcgatgatttattactttgacatgatttattactttctaatgatttattactttactatgatttattacttttgcatgatttattactttgtaggcgcgccatgcttcatcagactct

SEQ ID NO: 10609 - DNA, 197 bp, Artificial Sequence; identical to SEQ ID NO: 10608
  Synthetic polynucleotide

SEQ ID NO: 10610 - DNA, 140 bp, Artificial Sequence
  Synthetic polynucleotide
atcatctcaccttgcctcctgcccttcgtgtgaactgacctgcaggaacaatagaaacaattcgaacaatgacaacaatctaaacaatactaacaattgcaacaatgtaaacaatggcgcgccatgcttcatcagactct

SEQ ID NO: 10611 - DNA, 140 bp, Artificial Sequence; identical to SEQ ID NO: 10610
  Synthetic polynucleotide

SEQ ID NO: 10612 - DNA, 188 bp, Artificial Sequence
  Synthetic polynucleotide
atcatctcaccttgcctcctgtagaaccgactaccacgcctgcaggattgcacaatttagaattgcacaattttcgattgcacaatttgacattgcacaatttctaattgcacaatttactattgcacaattttgcattgcacaatttgtaattgcacaatttggcgcgccatgcttcatcagactct

SEQ ID NO: 10613 - DNA, 188 bp, Artificial Sequence; identical to SEQ ID NO: 10612
  Synthetic polynucleotide

SEQ ID NO: 10614 - DNA, 197 bp, Artificial Sequence
  Synthetic polynucleotide
atcatctcaccttgcctcctgttgggaccaggtacccacctgcaggttctatttttggcatagattctatttttggcattcgttctatttttggcatgacttctatttttggcatctattctatttttggcatactttctatttttggcattgcttctatttttggcatgtaggcgcgccatgcttcatcagactct

SEQ ID NO: 10615 - DNA, 197 bp, Artificial Sequence; identical to SEQ ID NO: 10614
  Synthetic polynucleotide

SEQ ID NO: 10616 - DNA, 180 bp, Artificial Sequence
  Synthetic polynucleotide
atcatctcaccttgcctcctgactcgcttgtatcacttcctgcaggcacagctgcagagacacagctgcagtcgcacagctgcaggaccacagctgcagctacacagctgcagactcacagctgcagtgccacagctgcaggtacacagctgcagggcgcgccatgcttcatcagactct

SEQ ID NO: 10617 - DNA, 180 bp, Artificial Sequence; identical to SEQ ID NO: 10616
  Synthetic polynucleotide

SEQ ID NO: 10618 - DNA, 197 bp, Artificial Sequence
  Synthetic polynucleotide
atcatctcaccttgcctcctgatatcagacaggctgggcctgcaggcatttccgggaaatgagacatttccgggaaatgtcgcatttccgggaaatggaccatttccgggaaatgctacatttccgggaaatgactcatttccgggaaatgtgccatttccgggaaatggtaggcgcgccatgcttcatcagactct

SEQ ID NO: 10619 - DNA, 197 bp, Artificial Sequence; identical to SEQ ID NO: 10618
  Synthetic polynucleotide

SEQ ID NO: 10620 - DNA, 164 bp, Artificial Sequence
  Synthetic polynucleotide
atcatctcaccttgcctcctgacgcaccaattcttagccctgcagggagaacaatagagagaacaattcggagaacaatgacgagaacaatctagagaacaatactgagaacaattgcgagaacaatgtagagaacaatggcgcgccatgcttcatcagactct

SEQ ID NO: 10621 - DNA, 164 bp, Artificial Sequence; identical to SEQ ID NO: 10620
  Synthetic polynucleotide

SEQ ID NO: 10622 - DNA, 180 bp, Artificial Sequence
  Synthetic polynucleotide
atcatctcaccttgcctcctgctaggtgctgggaggtacctgcaggcggcagatggtagacggcagatggttcgcggcagatggtgaccggcagatggtctacggcagatggtactcggcagatggttgccggcagatggtgtacggcagatggtggcgcgccatgcttcatcagactct

SEQ ID NO: 10623 - DNA, 180 bp, Artificial Sequence; identical to SEQ ID NO: 10622
  Synthetic polynucleotide

SEQ ID NO: 10624 - DNA, 197 bp, Artificial Sequence
  Synthetic polynucleotide
atcatctcaccttgcctcctgatagccgtcaagtgtgacctgcagggaggggtgcccgcaggccagagaggggtgcccgcaggcctcggaggggtgcccgcaggccgacgaggggtgcccgcaggccctagaggggtgcccgcaggccactgaggggtgcccgcaggcctgcggcgcgccatgcttcatcagactct

SEQ ID NO: 10625 - DNA, 197 bp, Artificial Sequence; identical to SEQ ID NO: 10624
  Synthetic polynucleotide

SEQ ID NO: 10626 - DNA, 190 bp, Artificial Sequence
  Synthetic polynucleotide
atcatctcaccttgcctcctggtatcagagcgtagacgcctgcaggatttttttggttttagaatttttttggtttttcgatttttttggttttgacatttttttggttttctaatttttttggttttactatttttttggtttttgcatttttttggttttgtaggcgcgccatgcttcatcagactct

SEQ ID NO: 10627 - DNA, 190 bp, Artificial Sequence; identical to SEQ ID NO: 10626
  Synthetic polynucleotide

SEQ ID NO: 10628 - DNA, 191 bp, Artificial Sequence
  Synthetic polynucleotide
atcatctcaccttgcctcctggttgccatgatgaaccacctgcaggagaagaacaaaggactaagaagaagaacaaaggactatcgagaagaacaaaggactagacagaagaacaaaggactactaagaagaacaaaggactaactagaagaacaaaggactatgcggcgcgccatgcttcatcagactct

SEQ ID NO: 10629 - DNA, 191 bp, Artificial Sequence; identical to SEQ ID NO: 10628
  Synthetic polynucleotide

SEQ ID NO: 10630 - DNA, 180 bp, Artificial Sequence
  Synthetic polynucleotide
atcatctcaccttgcctcctgaaacgatcccgcagggtcctgcaggccggggtgctgagaccggggtgctgtcgccggggtgctggacccggggtgctgctaccggggtgctgactccggggtgctgtgcccggggtgctggtaccggggtgctgggcgcgccatgcttcatcagactct

SEQ ID NO: 10631 - DNA, 180 bp, Artificial Sequence; identical to SEQ ID NO: 10630
  Synthetic polynucleotide

SEQ ID NO: 10632 - DNA, 188 bp, Artificial Sequence
  Synthetic polynucleotide
atcatctcaccttgcctcctggatgaagccgctcgattcctgcaggaataaacaaacaagaaataaacaaacatcgaataaacaaacagacaataaacaaacactaaataaacaaacaactaataaacaaacatgcaataaacaaacagtaaataaacaaacaggcgcgccatgcttcatcagactct

SEQ ID NO: 10633 - DNA, 188 bp, Artificial Sequence; identical to SEQ ID NO: 10632
  Synthetic polynucleotide

SEQ ID NO: 10634 - DNA, 197 bp, Artificial Sequence
  Synthetic polynucleotide
atcatctcaccttgcctcctgaaataatcaaagacgggcctgcaggttataaataaacattcaaagattataaataaacattcaatcgttataaataaacattcaagacttataaataaacattcaactattataaataaacattcaaactttataaataaacattcaatgcggcgcgccatgcttcatcagactct

SEQ ID NO: 10635 - DNA, 197 bp, Artificial Sequence; identical to SEQ ID NO: 10634
  Synthetic polynucleotide

SEQ ID NO: 10636 - DNA, 172 bp, Artificial Sequence
  Synthetic polynucleotide
atcatctcaccttgcctcctgagtgcggtgacggtatgcctgcaggatcacatgacagaatcacatgactcgatcacatgacgacatcacatgacctaatcacatgacactatcacatgactgcatcacatgacgtaatcacatgacggcgcgccatgcttcatcagactct

SEQ ID NO: 10637 - DNA, 172 bp, Artificial Sequence; identical to SEQ ID NO: 10636
  Synthetic polynucleotide

SEQ ID NO: 10638 - DNA, 196 bp, Artificial Sequence
  Synthetic polynucleotide
atcatctcaccttgcctcctgcgctcatcggtgttgaccctgcaggccacttccggttcagaccacttccggttctcgccacttccggttcgacccacttccggttcctaccacttccggttcactccacttccggttctgcccacttccggttcgtaccacttccggttcggcgcgccatgcttcatcagactct

SEQ ID NO: 10639 - DNA, 196 bp, Artificial Sequence; identical to SEQ ID NO: 10638
  Synthetic polynucleotide

SEQ ID NO: 10640 - DNA, 172 bp, Artificial Sequence
  Synthetic polynucleotide
atcatctcaccttgcctcctgctgagcaagtacccttgcctgcaggcccaattagcagacccaattagctcgcccaattagcgaccccaattagcctacccaattagcactcccaattagctgccccaattagcgtacccaattagcggcgcgccatgcttcatcagactct

SEQ ID NO: 10641 - DNA, 172 bp, Artificial Sequence; identical to SEQ ID NO: 10640
  Synthetic polynucleotide

SEQ ID NO: 10642 - DNA, 164 bp, Artificial Sequence
  Synthetic polynucleotide
atcatctcaccttgcctcctgggacaaagtcacaattccctgcaggtttatgaccagatttatgacctcgtttatgaccgactttatgaccctatttatgaccacttttatgacctgctttatgaccgtatttatgaccggcgcgccatgcttcatcagactct

SEQ ID NO: 10643 - DNA, 164 bp, Artificial Sequence; identical to SEQ ID NO: 10642
  Synthetic polynucleotide

SEQ ID NO: 10644 - DNA, 196 bp, Artificial Sequence
  Synthetic polynucleotide
atcatctcaccttgcctcctgcccgtcaggtatccatccctgcaggaaattagcataatagaaaattagcataattcgaaattagcataatgacaaattagcataatctaaaattagcataatactaaattagcataattgcaaattagcataatgtaaaattagcataatggcgcgccatgcttcatcagactct

SEQ ID NO: 10645 - DNA, 196 bp, Artificial Sequence; identical to SEQ ID NO: 10644
  Synthetic polynucleotide

SEQ ID NO: 10646 - DNA, 148 bp, Artificial Sequence
  Synthetic polynucleotide
atcatctcaccttgcctcctgcaatctctcatcaaacacctgcagggcatgacagagcatgactcggcatgacgacgcatgacctagcatgacactgcatgactgcgcatgacgtagcatgacggcgcgccatgcttcatcagactct

SEQ ID NO: 10647 - DNA, 148 bp, Artificial Sequence; identical to SEQ ID NO: 10646
  Synthetic polynucleotide

SEQ ID NO: 10648 - DNA, 200 bp, Artificial Sequence
  Synthetic polynucleotide
atcatctcaccttgcctcctgccacttcggctgtgatacctgcagggagggcagtgaagcgtgacagagagggcagtgaagcgtgactcggagggcagtgaagcgtgacgacgagggcagtgaagcgtgacctagagggcagtgaagcgtgacactgagggcagtgaagcgtgacggcgcgccatgcttcatcagactct

SEQ ID NO: 10649 - DNA, 200 bp, Artificial Sequence; identical to SEQ ID NO: 10648
  Synthetic polynucleotide

SEQ ID NO: 10650 - DNA, 185 bp, Artificial Sequence
  Synthetic polynucleotide
atcatctcaccttgcctcctgtcgcgtaaatgaacgcgcctgcaggaggttaattagctgatagaaggttaattagctgattcgaggttaattagctgatgacaggttaattagctgatctaaggttaattagctgatactaggttaattagctgattgcggcgcgccatgcttcatcagactct

SEQ ID NO: 10651 - DNA, 185 bp, Artificial Sequence; identical to SEQ ID NO: 10650
  Synthetic polynucleotide

SEQ ID NO: 10652 - DNA, 172 bp, Artificial Sequence
  Synthetic polynucleotide
atcatctcaccttgcctcctgcctgtatcattgcgaaacctgcaggacaagagggcagaacaagagggctcgacaagagggcgacacaagagggcctaacaagagggcactacaagagggctgcacaagagggcgtaacaagagggcggcgcgccatgcttcatcagactct

SEQ ID NO: 10653 - DNA, 172 bp, Artificial Sequence; identical to SEQ ID NO: 10652
  Synthetic polynucleotide

SEQ ID NO: 10654 - DNA, 196 bp, Artificial Sequence
  Synthetic polynucleotide
atcatctcaccttgcctcctgcgtgattcgtgcgaagccctgcaggactgtgggaaacgagaactgtgggaaacgtcgactgtgggaaacggacactgtgggaaacgctaactgtgggaaacgactactgtgggaaacgtgcactgtgggaaacggtaactgtgggaaacgggcgcgccatgcttcatcagactct

SEQ ID NO: 10655 - DNA, 196 bp, Artificial Sequence; identical to SEQ ID NO: 10654
  Synthetic polynucleotide

SEQ ID NO: 10656 - DNA, 140 bp, Artificial Sequence
  Synthetic polynucleotide
atcatctcaccttgcctcctgttattggcccacaattacctgcaggtgatacagatgatactcgtgatacgactgatacctatgatacacttgatactgctgatacgtatgatacggcgcgccatgcttcatcagactct

SEQ ID NO: 10657 - DNA, 140 bp, Artificial Sequence; identical to SEQ ID NO: 10656
  Synthetic polynucleotide

SEQ ID NO: 10658 - DNA, 197 bp, Artificial Sequence
  Synthetic polynucleotide
atcatctcaccttgcctcctgtgacagcctttcccaatcctgcaggtgggtcattagactcagatgggtcattagactctcgtgggtcattagactcgactgggtcattagactcctatgggtcattagactcacttgggtcattagactctgctgggtcattagactcgtaggcgcgccatgcttcatcagactct

SEQ ID NO: 10659 - DNA, 197 bp, Artificial Sequence; identical to SEQ ID NO: 10658
  Synthetic polynucleotide

SEQ ID NO: 10660 - DNA, 180 bp, Artificial Sequence
  Synthetic polynucleotide
atcatctcaccttgcctcctgtgtaggacaataacatgcctgcaggcttcacacctaagacttcacacctatcgcttcacacctagaccttcacacctactacttcacacctaactcttcacacctatgccttcacacctagtacttcacacctaggcgcgccatgcttcatcagactct

SEQ ID NO: 10661 - DNA, 180 bp, Artificial Sequence; identical to SEQ ID NO: 10660
  Synthetic polynucleotide

SEQ ID NO: 10662 - DNA, 148 bp, Artificial Sequence
  Synthetic polynucleotide
atcatctcaccttgcctcctgggtgagtagccatacaccctgcaggaaggtcaagaaaggtcatcgaaggtcagacaaggtcactaaaggtcaactaaggtcatgcaaggtcagtaaaggtcaggcgcgccatgcttcatcagactct

SEQ ID NO: 10663 - DNA, 148 bp, Artificial Sequence; identical to SEQ ID NO: 10662
  Synthetic polynucleotide

SEQ ID NO: 10664 - DNA, 172 bp, Artificial Sequence
  Synthetic polynucleotide
atcatctcaccttgcctcctgattccggttcaaataaccctgcaggggtcaaaggtagaggtcaaaggttcgggtcaaaggtgacggtcaaaggtctaggtcaaaggtactggtcaaaggttgcggtcaaaggtgtaggtcaaaggtggcgcgccatgcttcatcagactct

SEQ ID NO: 10665 - DNA, 172 bp, Artificial Sequence; identical to SEQ ID NO: 10664
  Synthetic polynucleotide

SEQ ID NO: 10666 - DNA, 172 bp, Artificial Sequence
  Synthetic polynucleotide
atcatctcaccttgcctcctgctgacctcgaagagatacctgcaggggtaataaaaagaggtaataaaatcgggtaataaaagacggtaataaaactaggtaataaaaactggtaataaaatgcggtaataaaagtaggtaataaaaggcgcgccatgcttcatcagactct

SEQ ID NO: 10667 - DNA, 172 bp, Artificial Sequence; identical to SEQ ID NO: 10666
  Synthetic polynucleotide

SEQ ID NO: 10668 - DNA, 188 bp, Artificial Sequence
  Synthetic polynucleotide
atcatctcaccttgcctcctgcgaggcatctccaaccacctgcaggcgccaggtgctgagacgccaggtgctgtcgcgccaggtgctggaccgccaggtgctgctacgccaggtgctgactcgccaggtgctgtgccgccaggtgctggtacgccaggtgctgggcgcgccatgcttcatcagactct

SEQ ID NO: 10669 - DNA, 188 bp, Artificial Sequence; identical to SEQ ID NO: 10668
  Synthetic polynucleotide

SEQ ID NO: 10670 - DNA, 197 bp, Artificial Sequence
  Synthetic polynucleotide
atcatctcaccttgcctcctgatacttggccgtagggccctgcaggggggtttgtggtttgagaggggtttgtggtttgtcgggggtttgtggtttggacggggtttgtggtttgctaggggtttgtggtttgactggggtttgtggtttgtgcggggtttgtggtttggtaggcgcgccatgcttcatcagactct

SEQ ID NO: 10671 - DNA, 197 bp, Artificial Sequence; identical to SEQ ID NO: 10670
  Synthetic polynucleotide

SEQ ID NO: 10672 - DNA, 185 bp, Artificial Sequence
  Synthetic polynucleotide
atcatctcaccttgcctcctgcatagtgcattcgcaatcctgcaggaaaacaggaagtacgtagaaaaacaggaagtacgttcgaaaacaggaagtacgtgacaaaacaggaagtacgtctaaaaacaggaagtacgtactaaaacaggaagtacgttgcggcgcgccatgcttcatcagactct

SEQ ID NO: 10673 - DNA, 185 bp, Artificial Sequence; identical to SEQ ID NO: 10672
  Synthetic polynucleotide

SEQ ID NO: 10674 - DNA, 172 bp, Artificial Sequence
  Synthetic polynucleotide
atcatctcaccttgcctcctgctcagtctaatccggatcctgcaggctgacctttgagactgacctttgtcgctgacctttggacctgacctttgctactgacctttgactctgacctttgtgcctgacctttggtactgacctttgggcgcgccatgcttcatcagactct

SEQ ID NO: 10675 - DNA, 172 bp, Artificial Sequence; identical to SEQ ID NO: 10674
  Synthetic polynucleotide

SEQ ID NO: 10676 - DNA, 191 bp, Artificial Sequence
  Synthetic polynucleotide
atcatctcaccttgcctcctgcgtaagatgacacggcgcctgcaggtgagctaattagttggaagatgagctaattagttggatcgtgagctaattagttggagactgagctaattagttggactatgagctaattagttggaacttgagctaattagttggatgcggcgcgccatgcttcatcagactct

SEQ ID NO: 10677 - DNA, 191 bp, Artificial Sequence; identical to SEQ ID NO: 10676
  Synthetic polynucleotide

SEQ ID NO: 10678 - DNA, 191 bp, Artificial Sequence
  Synthetic polynucleotide
atcatctcaccttgcctcctgttggtgagccatacacacctgcaggtgttttacatgtatattagatgttttacatgtatatttcgtgttttacatgtatattgactgttttacatgtatattctatgttttacatgtatattacttgttttacatgtatatttgcggcgcgccatgcttcatcagactct

SEQ ID NO: 10679 - DNA, 191 bp, Artificial Sequence; identical to SEQ ID NO: 10678
  Synthetic polynucleotide

SEQ ID NO: 10680 - DNA, 172 bp, Artificial Sequence
  Synthetic polynucleotide
atcatctcaccttgcctcctgcgaagcgtgactgcaaccctgcaggtccctattcgagatccctattcgtcgtccctattcggactccctattcgctatccctattcgacttccctattcgtgctccctattcggtatccctattcgggcgcgccatgcttcatcagactct

SEQ ID NO: 10681 - DNA, 172 bp, Artificial Sequence; identical to SEQ ID NO: 10680
  Synthetic polynucleotide

SEQ ID NO: 10682 - DNA, 140 bp, Artificial Sequence
  Synthetic polynucleotide
atcatctcaccttgcctcctggacggtctcagacatagcctgcaggtgacagagatgacagtcgtgacaggactgacagctatgacagacttgacagtgctgacaggtatgacagggcgcgccatgcttcatcagactct

SEQ ID NO: 10683 - DNA, 140 bp, Artificial Sequence; identical to SEQ ID NO: 10682
  Synthetic polynucleotide

SEQ ID NO: 10684 - DNA, 197 bp, Artificial Sequence
  Synthetic polynucleotide
atcatctcaccttgcctcctgcactgtcaagtcacgcgcctgcaggtacgtcagttacgtaagatacgtcagttacgtatcgtacgtcagttacgtagactacgtcagttacgtactatacgtcagttacgtaacttacgtcagttacgtatgctacgtcagttacgtagtaggcgcgccatgcttcatcagactct

SEQ ID NO: 10685 - DNA, 197 bp, Artificial Sequence; identical to SEQ ID NO: 10684
  Synthetic polynucleotide

SEQ ID NO: 10686 - DNA, 172 bp, Artificial Sequence
  Synthetic polynucleotide
atcatctcaccttgcctcctgccattagcagtacacatcctgcaggtttgacagctagatttgacagcttcgtttgacagctgactttgacagctctatttgacagctacttttgacagcttgctttgacagctgtatttgacagctggcgcgccatgcttcatcagactct

SEQ ID NO: 10687 - DNA, 172 bp, Artificial Sequence; identical to SEQ ID NO: 10686
  Synthetic polynucleotide

SEQ ID NO: 10688 - DNA, 190 bp, Artificial Sequence
  Synthetic polynucleotide
atcatctcaccttgcctcctgcaagtgataattacgtgcctgcagggccgggcagcggggagagccgggcagcggggtcggccgggcagcgggggacgccgggcagcggggctagccgggcagcggggactgccgggcagcggggtgcgccgggcagcgggggtaggcgcgccatgcttcatcagactct

SEQ ID NO: 10689 - DNA, 190 bp, Artificial Sequence; identical to SEQ ID NO: 10688
  Synthetic polynucleotide

SEQ ID NO: 10690 - DNA, 188 bp, Artificial Sequence
  Synthetic polynucleotide
atcatctcaccttgcctcctggcacagggatgacaatgcctgcaggcacacccgcattagacacacccgcatttcgcacacccgcattgaccacacccgcattctacacacccgcattactcacacccgcatttgccacacccgcattgtacacacccgcattggcgcgccatgcttcatcagactct

SEQ ID NO: 10691 - DNA, 188 bp, Artificial Sequence; identical to SEQ ID NO: 10690
  Synthetic polynucleotide

SEQ ID NO: 10692 - DNA, 180 bp, Artificial Sequence
  Synthetic polynucleotide
atcatctcaccttgcctcctggggtacagtttgcagaccctgcaggtatcaccccacagatatcaccccactcgtatcaccccacgactatcaccccacctatatcaccccacacttatcaccccactgctatcaccccacgtatatcaccccacggcgcgccatgcttcatcagactct

SEQ ID NO: 10693 - DNA, 180 bp, Artificial Sequence; identical to SEQ ID NO: 10692
  Synthetic polynucleotide

SEQ ID NO: 10694 - DNA, 180 bp, Artificial Sequence
  Synthetic polynucleotide
atcatctcaccttgcctcctgggtctacgaagagacgtcctgcaggaccagatggtcagaaccagatggtctcgaccagatggtcgacaccagatggtcctaaccagatggtcactaccagatggtctgcaccagatggtcgtaaccagatggtcggcgcgccatgcttcatcagactct

SEQ ID NO: 10695 - DNA, 180 bp, Artificial Sequence; identical to SEQ ID NO: 10694
  Synthetic polynucleotide

SEQ ID NO: 10696 - DNA, 185 bp, Artificial Sequence
  Synthetic polynucleotide
atcatctcaccttgcctcctgtccagactagccagacccctgcaggtctcaaaggtcacctgagatctcaaaggtcacctgtcgtctcaaaggtcacctggactctcaaaggtcacctgctatctcaaaggtcacctgacttctcaaaggtcacctgtgcggcgcgccatgcttcatcagactct

SEQ ID NO: 10697 - DNA, 185 bp, Artificial Sequence; identical to SEQ ID NO: 10696
  Synthetic polynucleotide

SEQ ID NO: 10698 - DNA, 172 bp, Artificial Sequence
  Synthetic polynucleotide
atcatctcaccttgcctcctgctaggatcctatgttctcctgcaggccctttgatgagaccctttgatgtcgccctttgatggacccctttgatgctaccctttgatgactccctttgatgtgcccctttgatggtaccctttgatgggcgcgccatgcttcatcagactct

SEQ ID NO: 10699 - DNA, 172 bp, Artificial Sequence; identical to SEQ ID NO: 10698
  Synthetic polynucleotide

SEQ ID NO: 10700 - DNA, 156 bp, Artificial Sequence
  Synthetic polynucleotide
atcatctcaccttgcctcctggcatgcgctagatccaccctgcaggtcataaaaagatcataaaatcgtcataaaagactcataaaactatcataaaaacttcataaaatgctcataaaagtatcataaaaggcgcgccatgcttcatcagactct

SEQ ID NO: 10701 - DNA, 156 bp, Artificial Sequence; identical to SEQ ID NO: 10700
  Synthetic polynucleotide

SEQ ID NO: 10702 - DNA, 156 bp, Artificial Sequence
  Synthetic polynucleotide
atcatctcaccttgcctcctggcacgcgtaaggacttgcctgcaggattacatgagaattacatgtcgattacatggacattacatgctaattacatgactattacatgtgcattacatggtaattacatgggcgcgccatgcttcatcagactct

SEQ ID NO: 10703 - DNA, 156 bp, Artificial Sequence; identical to SEQ ID NO: 10702
  Synthetic polynucleotide

SEQ ID NO: 10704 - DNA, 196 bp, Artificial Sequence
  Synthetic polynucleotide
atcatctcaccttgcctcctggaccataatactctgtacctgcaggcagctccccagggagacagctccccagggtcgcagctccccaggggaccagctccccagggctacagctccccagggactcagctccccagggtgccagctccccaggggtacagctccccagggggcgcgccatgcttcatcagactct

SEQ ID NO: 10705 - DNA, 196 bp, Artificial Sequence; identical to SEQ ID NO: 10704
  Synthetic polynucleotide

SEQ ID NO: 10706 - DNA, 148 bp, Artificial Sequence
  Synthetic polynucleotide
atcatctcaccttgcctcctgacttaatagcgagctcccctgcagggttaatgagagttaatgtcggttaatggacgttaatgctagttaatgactgttaatgtgcgttaatggtagttaatgggcgcgccatgcttcatcagactct

SEQ ID NO: 10707 - DNA, 148 bp, Artificial Sequence; identical to SEQ ID NO: 10706
  Synthetic polynucleotide

SEQ ID NO: 10708 - DNA, 172 bp, Artificial Sequence
  Synthetic polynucleotide
atcatctcaccttgcctcctgttactcctcaccgaaagcctgcaggtcattaattgagatcattaattgtcgtcattaattggactcattaattgctatcattaattgacttcattaattgtgctcattaattggtatcattaattgggcgcgccatgcttcatcagactct

SEQ ID NO: 10709 - DNA, 172 bp, Artificial Sequence; identical to SEQ ID NO: 10708
  Synthetic polynucleotide

SEQ ID NO: 10710 - DNA, 200 bp, Artificial Sequence
  Synthetic polynucleotide
atcatctcaccttgcctcctggcgtacgtcgtcttcgacctgcaggttgtgctgagtcagcatttagattgtgctgagtcagcattttcgttgtgctgagtcagcatttgacttgtgctgagtcagcatttctattgtgctgagtcagcatttactttgtgctgagtcagcatttggcgcgccatgcttcatcagactct

SEQ ID NO: 10711 - DNA, 200 bp, Artificial Sequence; identical to SEQ ID NO: 10710
  Synthetic polynucleotide

SEQ ID NO: 10712 - DNA, 172 bp, Artificial Sequence
  Synthetic polynucleotide
atcatctcaccttgcctcctgcgagacagtggaagtcacctgcagggcacttgagcagagcacttgagctcggcacttgagcgacgcacttgagcctagcacttgagcactgcacttgagctgcgcacttgagcgtagcacttgagcggcgcgccatgcttcatcagactct

SEQ ID NO: 10713 - DNA, 172 bp, Artificial Sequence; identical to SEQ ID NO: 10712
  Synthetic polynucleotide

SEQ ID NO: 10714 - DNA, 156 bp, Artificial Sequence
  Synthetic polynucleotide
atcatctcaccttgcctcctggatgatatgcaacggcgcctgcaggcatttctaagacatttctatcgcatttctagaccatttctactacatttctaactcatttctatgccatttctagtacatttctaggcgcgccatgcttcatcagactct

SEQ ID NO: 10715 - DNA, 156 bp, Artificial Sequence; identical to SEQ ID NO: 10714
  Synthetic polynucleotide

SEQ ID NO: 10716 - DNA, 190 bp, Artificial Sequence
  Synthetic polynucleotide
atcatctcaccttgcctcctgtcaaggctcatcgccaccctgcagggacaggaagtaattagagacaggaagtaatttcggacaggaagtaattgacgacaggaagtaattctagacaggaagtaattactgacaggaagtaatttgcgacaggaagtaattgtaggcgcgccatgcttcatcagactct

SEQ ID NO: 10717 - DNA, 190 bp, Artificial Sequence; identical to SEQ ID NO: 10716
  Synthetic polynucleotide

SEQ ID NO: 10718 - DNA, 164 bp, Artificial Sequence
  Synthetic polynucleotide
atcatctcaccttgcctcctgaggtgagaagaatttctcctgcaggacaggaagtagaacaggaagttcgacaggaagtgacacaggaagtctaacaggaagtactacaggaagttgcacaggaagtgtaacaggaagtggcgcgccatgcttcatcagactct

SEQ ID NO: 10719 - DNA, 164 bp, Artificial Sequence; identical to SEQ ID NO: 10718
  Synthetic polynucleotide

SEQ ID NO: 10720 - DNA, 191 bp, Artificial Sequence
  Synthetic polynucleotide
atcatctcaccttgcctcctgctgcaaacaaacggctacctgcagggcttattaattaactcgagagcttattaattaactcgtcggcttattaattaactcggacgcttattaattaactcgctagcttattaattaactcgactgcttattaattaactcgtgcggcgcgccatgcttcatcagactct

SEQ ID NO: 10721 - DNA, 191 bp, Artificial Sequence; identical to SEQ ID NO: 10720
  Synthetic polynucleotide

SEQ ID NO: 10722 - DNA, 188 bp, Artificial Sequence
  Synthetic polynucleotide
atcatctcaccttgcctcctgcctcggtggccttgtatcctgcaggcaacacctgtccagacaacacctgtcctcgcaacacctgtccgaccaacacctgtccctacaacacctgtccactcaacacctgtcctgccaacacctgtccgtacaacacctgtccggcgcgccatgcttcatcagactct

SEQ ID NO: 10723 - DNA, 188 bp, Artificial Sequence; identical to SEQ ID NO: 10722
  Synthetic polynucleotide

SEQ ID NO: 10724 - DNA, 156 bp, Artificial Sequence
  Synthetic polynucleotide
atcatctcaccttgcctcctgttagtagggacgtcagtcctgcagggggggcggagagggggcggtcggggggcgggacgggggcggctagggggcggactgggggcggtgcgggggcgggtagggggcggggcgcgccatgcttcatcagactct

SEQ ID NO: 10725 - DNA, 156 bp, Artificial Sequence; identical to SEQ ID NO: 10724
  Synthetic polynucleotide

SEQ ID NO: 10726 - DNA, 191 bp, Artificial Sequence
  Synthetic polynucleotide
atcatctcaccttgcctcctgcggagagtagcatgcatcctgcaggcaaggtcgtaaaatcttagacaaggtcgtaaaatctttcgcaaggtcgtaaaatcttgaccaaggtcgtaaaatcttctacaaggtcgtaaaatcttactcaaggtcgtaaaatctttgcggcgcgccatgcttcatcagactct

SEQ ID NO: 10727 - DNA, 191 bp, Artificial Sequence; identical to SEQ ID NO: 10726
  Synthetic polynucleotide

SEQ ID NO: 10728 - DNA, 188 bp, Artificial Sequence
  Synthetic polynucleotide
atcatctcaccttgcctcctgaacgtcaagtgattcgccctgcaggactttcactttcagaactttcactttctcgactttcactttcgacactttcactttcctaactttcactttcactactttcactttctgcactttcactttcgtaactttcactttcggcgcgccatgcttcatcagactct

SEQ ID NO: 10729 - DNA, 188 bp, Artificial Sequence; identical to SEQ ID NO: 10728
  Synthetic polynucleotide

SEQ ID NO: 10730 - DNA, 172 bp, Artificial Sequence
  Synthetic polynucleotide
atcatctcaccttgcctcctgaggtccggtgactacctcctgcaggagccaatgagagaagccaatgagtcgagccaatgaggacagccaatgagctaagccaatgagactagccaatgagtgcagccaatgaggtaagccaatgagggcgcgccatgcttcatcagactct

SEQ ID NO: 10731 - DNA, 172 bp, Artificial Sequence; identical to SEQ ID NO: 10730
  Synthetic polynucleotide

SEQ ID NO: 10732 - DNA, 180 bp, Artificial Sequence
  Synthetic polynucleotide
atcatctcaccttgcctcctgagagaactgtcaccactcctgcaggccccggcctccagaccccggcctcctcgccccggcctccgacccccggcctccctaccccggcctccactccccggcctcctgcccccggcctccgtaccccggcctccggcgcgccatgcttcatcagactct

SEQ ID NO: 10733 - DNA, 180 bp, Artificial Sequence; identical to SEQ ID NO: 10732
  Synthetic polynucleotide

SEQ ID NO: 10734 - DNA, 197 bp, Artificial Sequence
  Synthetic polynucleotide
atcatctcaccttgcctcctgaggttaagtcacctatacctgcaggtagcgccccctggtggccagatagcgccccctggtggcctcgtagcgccccctggtggccgactagcgccccctggtggccctatagcgccccctggtggccacttagcgccccctggtggcctgcggcgcgccatgcttcatcagactct

SEQ ID NO: 10735 - DNA, 197 bp, Artificial Sequence; identical to SEQ ID NO: 10734
  Synthetic polynucleotide

SEQ ID NO: 10736 - DNA, 196 bp, Artificial Sequence
  Synthetic polynucleotide
atcatctcaccttgcctcctggtatggtggacgaaatacctgcaggttgtttattttttagattgtttatttttttcgttgtttattttttgacttgtttattttttctattgtttattttttactttgtttatttttttgcttgtttattttttgtattgtttattttttggcgcgccatgcttcatcagactct

SEQ ID NO: 10737 - DNA, 196 bp, Artificial Sequence; identical to SEQ ID NO: 10736
  Synthetic polynucleotide

SEQ ID NO: 10738 - DNA, 188 bp, Artificial Sequence
  Synthetic polynucleotide
atcatctcaccttgcctcctggttgaccgaaatactcacctgcaggccctttgatcttagaccctttgatctttcgccctttgatcttgacccctttgatcttctaccctttgatcttactccctttgatctttgcccctttgatcttgtaccctttgatcttggcgcgccatgcttcatcagactct

SEQ ID NO: 10739 - DNA, 188 bp, Artificial Sequence; identical to SEQ ID NO: 10738
  Synthetic polynucleotide

SEQ ID NO: 10740 - DNA, 164 bp, Artificial Sequence
  Synthetic polynucleotide
atcatctcaccttgcctcctgctcgtacttcttatgagcctgcaggaagcggaagagaaagcggaagtcgaagcggaaggacaagcggaagctaaagcggaagactaagcggaagtgcaagcggaaggtaaagcggaagggcgcgccatgcttcatcagactct

SEQ ID NO: 10741 - DNA, 164 bp, Artificial Sequence; identical to SEQ ID NO: 10740
  Synthetic polynucleotide

SEQ ID NO: 10742 - DNA, 197 bp, Artificial Sequence
  Synthetic polynucleotide
atcatctcaccttgcctcctgcagggtatcagccacgacctgcaggcatggccccagggcaagacatggccccagggcatcgcatggccccagggcagaccatggccccagggcactacatggccccagggcaactcatggccccagggcatgccatggccccagggcagtaggcgcgccatgcttcatcagactct

SEQ ID NO: 10743 - DNA, 197 bp, Artificial Sequence; identical to SEQ ID NO: 10742
  Synthetic polynucleotide

SEQ ID NO: 10744 - DNA, 185 bp, Artificial Sequence
  Synthetic polynucleotide
atcatctcaccttgcctcctgctgcatatctcccgagtcctgcagggtattgacagctccttagagtattgacagctcctttcggtattgacagctccttgacgtattgacagctccttctagtattgacagctccttactgtattgacagctcctttgcggcgcgccatgcttcatcagactct

SEQ ID NO: 10745 - DNA, 185 bp, Artificial Sequence; identical to SEQ ID NO: 10744
  Synthetic polynucleotide

SEQ ID NO: 10746 - DNA, 164 bp, Artificial Sequence
  Synthetic polynucleotide
atcatctcaccttgcctcctggaaacgaaaggaatgaccctgcaggttccgggaaagattccgggaatcgttccgggaagacttccgggaactattccgggaaactttccgggaatgcttccgggaagtattccgggaaggcgcgccatgcttcatcagactct

SEQ ID NO: 10747 - DNA, 164 bp, Artificial Sequence; identical to SEQ ID NO: 10746
  Synthetic polynucleotide

SEQ ID NO: 10748 - DNA, 197 bp, Artificial Sequence
  Synthetic polynucleotide
atcatctcaccttgcctcctgcgggtaatacagcgtagcctgcaggaacactgaaattgttagaaacactgaaattgtttcgaacactgaaattgttgacaacactgaaattgttctaaacactgaaattgttactaacactgaaattgtttgcaacactgaaattgttgtaggcgcgccatgcttcatcagactct

SEQ ID NO: 10749 - DNA, 197 bp, Artificial Sequence; identical to SEQ ID NO: 10748
  Synthetic polynucleotide

SEQ ID NO: 10750 - DNA, 190 bp, Artificial Sequence
  Synthetic polynucleotide
atcatctcaccttgcctcctgtatgccgctaggaactgcctgcaggggactacagctcccagaggactacagctccctcgggactacagctcccgacggactacagctcccctaggactacagctcccactggactacagctccctgcggactacagctcccgtaggcgcgccatgcttcatcagactct

SEQ ID NO: 10751 - DNA, 190 bp, Artificial Sequence; identical to SEQ ID NO: 10750
  Synthetic polynucleotide

SEQ ID NO: 10752 - DNA, 197 bp, Artificial Sequence
  Synthetic polynucleotide
atcatctcaccttgcctcctggcttcttcttctctacccctgcaggtcagcaccacggacaagatcagcaccacggacatcgtcagcaccacggacagactcagcaccacggacactatcagcaccacggacaacttcagcaccacggacatgctcagcaccacggacagtaggcgcgccatgcttcatcagactct

SEQ ID NO: 10753 - DNA, 197 bp, Artificial Sequence; identical to SEQ ID NO: 10752
  Synthetic polynucleotide

SEQ ID NO: 10754 - DNA, 172 bp, Artificial Sequence
  Synthetic polynucleotide
atcatctcaccttgcctcctgttgcagaaggtgtacttcctgcaggtctaattaacagatctaattaactcgtctaattaacgactctaattaacctatctaattaacacttctaattaactgctctaattaacgtatctaattaacggcgcgccatgcttcatcagactct

SEQ ID NO: 10755 - DNA, 172 bp, Artificial Sequence; identical to SEQ ID NO: 10754
  Synthetic polynucleotide

SEQ ID NO: 10756 - DNA, 172 bp, Artificial Sequence
  Synthetic polynucleotide
atcatctcaccttgcctcctgattatggcatggatatccctgcagggcctcgggcgagagcctcgggcgtcggcctcgggcggacgcctcgggcgctagcctcgggcgactgcctcgggcgtgcgcctcgggcggtagcctcgggcgggcgcgccatgcttcatcagactct

SEQ ID NO: 10757 - DNA, 172 bp, Artificial Sequence; identical to SEQ ID NO: 10756
  Synthetic polynucleotide

SEQ ID NO: 10758 - DNA, 172 bp, Artificial Sequence
  Synthetic polynucleotide
atcatctcaccttgcctcctgctaattcagccagcacccctgcaggcgccatcttgagacgccatcttgtcgcgccatcttggaccgccatcttgctacgccatcttgactcgccatcttgtgccgccatcttggtacgccatcttgggcgcgccatgcttcatcagactct

SEQ ID NO: 10759 - DNA, 172 bp, Artificial Sequence; identical to SEQ ID NO: 10758
  Synthetic polynucleotide

SEQ ID NO: 10760 - DNA, 197 bp, Artificial Sequence
  Synthetic polynucleotide
atcatctcaccttgcctcctgtaccaatgcctactttgcctgcaggatgctatttttagctagaatgctatttttagcttcgatgctatttttagctgacatgctatttttagctctaatgctatttttagctactatgctatttttagcttgcatgctatttttagctgtaggcgcgccatgcttcatcagactct

SEQ ID NO: 10761 - DNA, 197 bp, Artificial Sequence; identical to SEQ ID NO: 10760
  Synthetic polynucleotide

SEQ ID NO: 10762 - DNA, 197 bp, Artificial Sequence
  Synthetic polynucleotide
atcatctcaccttgcctcctgcaagtcagatttgagcccctgcagggctggtttgagctggagagctggtttgagctggtcggctggtttgagctgggacgctggtttgagctggctagctggtttgagctggactgctggtttgagctggtgcgctggtttgagctgggtaggcgcgccatgcttcatcagactct

SEQ ID NO: 10763 - DNA, 197 bp, Artificial Sequence; identical to SEQ ID NO: 10762
  Synthetic polynucleotide

SEQ ID NO: 10764 - DNA, 172 bp, Artificial Sequence
  Synthetic polynucleotide
atcatctcaccttgcctcctgcagcgacgtacccaaagcctgcaggtctaattaaaagatctaattaaatcgtctaattaaagactctaattaaactatctaattaaaacttctaattaaatgctctaattaaagtatctaattaaaggcgcgccatgcttcatcagactct

SEQ ID NO: 10765 - DNA, 172 bp, Artificial Sequence; identical to SEQ ID NO: 10764
  Synthetic polynucleotide

SEQ ID NO: 10766 - DNA, 148 bp, Artificial Sequence
  Synthetic polynucleotide
atcatctcaccttgcctcctgggaagtttagtgacagtcctgcaggaacaatgagaaacaatgtcgaacaatggacaacaatgctaaacaatgactaacaatgtgcaacaatggtaaacaatgggcgcgccatgcttcatcagactct

SEQ ID NO: 10767 - DNA, 148 bp, Artificial Sequence; identical to SEQ ID NO: 10766
  Synthetic polynucleotide

SEQ ID NO: 10768 - DNA, 197 bp, Artificial Sequence
  Synthetic polynucleotide
atcatctcaccttgcctcctgtcgggcaatgtgtacgacctgcaggagttaatcattaactagaagttaatcattaacttcgagttaatcattaactgacagttaatcattaactctaagttaatcattaactactagttaatcattaacttgcagttaatcattaactgtaggcgcgccatgcttcatcagactct

SEQ ID NO: 10769 - DNA, 197 bp, Artificial Sequence; identical to SEQ ID NO: 10768
  Synthetic polynucleotide

SEQ ID NO: 10770 - DNA, 196 bp, Artificial Sequence
  Synthetic polynucleotide
atcatctcaccttgcctcctgctgtgacggtaataatgcctgcaggcagccaatcagagagacagccaatcagagtcgcagccaatcagaggaccagccaatcagagctacagccaatcagagactcagccaatcagagtgccagccaatcagaggtacagccaatcagagggcgcgccatgcttcatcagactct

SEQ ID NO: 10771 - DNA, 196 bp, Artificial Sequence; identical to SEQ ID NO: 10770
  Synthetic polynucleotide

SEQ ID NO: 10772 - DNA, 188 bp, Artificial Sequence
  Synthetic polynucleotide
atcatctcaccttgcctcctgacgcatatctcgccatacctgcaggtgacctttgaccagatgacctttgacctcgtgacctttgaccgactgacctttgaccctatgacctttgaccacttgacctttgacctgctgacctttgaccgtatgacctttgaccggcgcgccatgcttcatcagactct

SEQ ID NO: 10773 - DNA, 188 bp, Artificial Sequence; identical to SEQ ID NO: 10772
  Synthetic polynucleotide

SEQ ID NO: 10774 - DNA, 188 bp, Artificial Sequence
  Synthetic polynucleotide
atcatctcaccttgcctcctgggaatacttccactgggcctgcaggttctgattggtcagattctgattggtctcgttctgattggtcgacttctgattggtcctattctgattggtcactttctgattggtctgcttctgattggtcgtattctgattggtcggcgcgccatgcttcatcagactct

SEQ ID NO: 10775 - DNA, 188 bp, Artificial Sequence; identical to SEQ ID NO: 10774
  Synthetic polynucleotide

SEQ ID NO: 10776 - DNA, 197 bp, Artificial Sequence
  Synthetic polynucleotide
atcatctcaccttgcctcctgaataacctgatgctcgccctgcagggcaggagggtatggcagagcaggagggtatggctcggcaggagggtatggcgacgcaggagggtatggcctagcaggagggtatggcactgcaggagggtatggctgcgcaggagggtatggcgtaggcgcgccatgcttcatcagactct

SEQ ID NO: 10777 - DNA, 197 bp, Artificial Sequence; identical to SEQ ID NO: 10776
  Synthetic polynucleotide

SEQ ID NO: 10778 - DNA, 180 bp, Artificial Sequence
  Synthetic polynucleotide
atcatctcaccttgcctcctgagcattcgacgtggtcgcctgcaggtaattagctaaagataattagctaatcgtaattagctaagactaattagctaactataattagctaaacttaattagctaatgctaattagctaagtataattagctaaggcgcgccatgcttcatcagactct

SEQ ID NO: 10779 - DNA, 180 bp, Artificial Sequence; identical to SEQ ID NO: 10778
  Synthetic polynucleotide

SEQ ID NO: 10780 - DNA, 191 bp, Artificial Sequence
  Synthetic polynucleotide
atcatctcaccttgcctcctgcatacgtgcaaagacgccctgcaggacaagcaattaatgaatagaacaagcaattaatgaattcgacaagcaattaatgaatgacacaagcaattaatgaatctaacaagcaattaatgaatactacaagcaattaatgaattgcggcgcgccatgcttcatcagactct

SEQ ID NO: 10781 - DNA, 191 bp, Artificial Sequence; identical to SEQ ID NO: 10780
  Synthetic polynucleotide

SEQ ID NO: 10782 - DNA, 156 bp, Artificial Sequence
  Synthetic polynucleotide
atcatctcaccttgcctcctgatccacccaacacaaggcctgcaggctgaccccagactgacccctcgctgaccccgacctgaccccctactgaccccactctgacccctgcctgaccccgtactgaccccggcgcgccatgcttcatcagactct

SEQ ID NO: 10783 - DNA, 156 bp, Artificial Sequence; identical to SEQ ID NO: 10782
  Synthetic polynucleotide

SEQ ID NO: 10784 - DNA, 197 bp, Artificial Sequence
  Synthetic polynucleotide
atcatctcaccttgcctcctgcgtcgtagttagttagtcctgcaggcggcggcggcgcctgagacggcggcggcgcctgtcgcggcggcggcgcctggaccggcggcggcgcctgctacggcggcggcgcctgactcggcggcggcgcctgtgccggcggcggcgcctggtaggcgcgccatgcttcatcagactct

SEQ ID NO: 10785 - DNA, 197 bp, Artificial Sequence; identical to SEQ ID NO: 10784
  Synthetic polynucleotide

SEQ ID NO: 10786 - DNA, 198 bp, Artificial Sequence
  Synthetic polynucleotide
atcatctcaccttgcctcctggatgaatatctcgtgaccctgcaggcccggagggcttcctggaggaggagacccggagggcttcctggaggaggtcgcccggagggcttcctggaggagggaccccggagggcttcctggaggaggctacccggagggcttcctggaggaggggcgcgccatgcttcatcagactct

SEQ ID NO: 10787 - DNA, 198 bp, Artificial Sequence; identical to SEQ ID NO: 10786
  Synthetic polynucleotide

SEQ ID NO: 10788 - DNA, 196 bp, Artificial Sequence
  Synthetic polynucleotide
atcatctcaccttgcctcctgctagtcttattgttcggcctgcaggaccccaaaccacccccccccccagaaccccaaaccaccccccccccctcgaccccaaaccacccccccccccgacaccccaaaccacccccccccccctaaccccaaaccacccccccccccactggcgcgccatgcttcatcagactct

SEQ ID NO: 10789 - DNA, 196 bp, Artificial Sequence; identical to SEQ ID NO: 10788
  Synthetic polynucleotide

SEQ ID NO: 10790 - DNA, 191 bp, Artificial Sequence
  Synthetic polynucleotide
atcatctcaccttgcctcctggtggaaacgtgcgccttcctgcaggtgcactaattagtggaaagatgcactaattagtggaatcgtgcactaattagtggaagactgcactaattagtggaactatgcactaattagtggaaacttgcactaattagtggaatgcggcgcgccatgcttcatcagactct

SEQ ID NO: 10791 - DNA, 191 bp, Artificial Sequence; identical to SEQ ID NO: 10790
  Synthetic polynucleotide

SEQ ID NO: 10792 - DNA, 156 bp, Artificial Sequence
  Synthetic polynucleotide
atcatctcaccttgcctcctgggcactgactcttagctcctgcaggattacaagagaattacaagtcgattacaaggacattacaagctaattacaagactattacaagtgcattacaaggtaattacaagggcgcgccatgcttcatcagactct

SEQ ID NO: 10793 - DNA, 156 bp, Artificial Sequence; identical to SEQ ID NO: 10792
  Synthetic polynucleotide

SEQ ID NO: 10794 - DNA, 164 bp, Artificial Sequence
  Synthetic polynucleotide
atcatctcaccttgcctcctgaggcctgttcagcatgacctgcagggtcgtaaaaagagtcgtaaaatcggtcgtaaaagacgtcgtaaaactagtcgtaaaaactgtcgtaaaatgcgtcgtaaaagtagtcgtaaaaggcgcgccatgcttcatcagactct

SEQ ID NO: 10795 - DNA, 164 bp, Artificial Sequence; identical to SEQ ID NO: 10794
  Synthetic polynucleotide

SEQ ID NO: 10796 - DNA, 190 bp, Artificial Sequence
  Synthetic polynucleotide
atcatctcaccttgcctcctgttgtacaaatgcctcatcctgcagggatgacgtggcattagagatgacgtggcatttcggatgacgtggcattgacgatgacgtggcattctagatgacgtggcattactgatgacgtggcatttgcgatgacgtggcattgtaggcgcgccatgcttcatcagactct

SEQ ID NO: 10797 - DNA, 190 bp, Artificial Sequence; identical to SEQ ID NO: 10796
  Synthetic polynucleotide

SEQ ID NO: 10798 - DNA, 188 bp, Artificial Sequence
  Synthetic polynucleotide
atcatctcaccttgcctcctgtggcctgggaatacgagcctgcaggaaaatgctgactagaaaaatgctgacttcgaaaatgctgactgacaaaatgctgactctaaaaatgctgactactaaaatgctgacttgcaaaatgctgactgtaaaaatgctgactggcgcgccatgcttcatcagactct

SEQ ID NO: 10799 - DNA, 188 bp, Artificial Sequence; identical to SEQ ID NO: 10798
  Synthetic polynucleotide

SEQ ID NO: 10800 - DNA, 156 bp, Artificial Sequence
  Synthetic polynucleotide
atcatctcaccttgcctcctggtattccgcaactgccgcctgcaggcagctggcagacagctggctcgcagctggcgaccagctggcctacagctggcactcagctggctgccagctggcgtacagctggcggcgcgccatgcttcatcagactct

SEQ ID NO: 10801 - DNA, 156 bp, Artificial Sequence; identical to SEQ ID NO: 10800
  Synthetic polynucleotide

SEQ ID NO: 10802 - DNA, 191 bp, Artificial Sequence
  Synthetic polynucleotide
atcatctcaccttgcctcctgtctcatgcgcttcggaccctgcagggccaccctctggtggccagagccaccctctggtggcctcggccaccctctggtggccgacgccaccctctggtggccctagccaccctctggtggccactgccaccctctggtggcctgcggcgcgccatgcttcatcagactct

SEQ ID NO: 10803 - DNA, 191 bp, Artificial Sequence; identical to SEQ ID NO: 10802
  Synthetic polynucleotide

SEQ ID NO: 10804 - DNA, 156 bp, Artificial Sequence
  Synthetic polynucleotide
atcatctcaccttgcctcctgcatcagtcttcaattagcctgcaggagaggtcaagaagaggtcatcgagaggtcagacagaggtcactaagaggtcaactagaggtcatgcagaggtcagtaagaggtcaggcgcgccatgcttcatcagactct

SEQ ID NO: 10805 - DNA, 156 bp, Artificial Sequence; identical to SEQ ID NO: 10804
  Synthetic polynucleotide

SEQ ID NO: 10806 - DNA, 164 bp, Artificial Sequence
  Synthetic polynucleotide
atcatctcaccttgcctcctgtcagtgtgtagtgacagcctgcaggcaactgccaagacaactgccatcgcaactgccagaccaactgccactacaactgccaactcaactgccatgccaactgccagtacaactgccaggcgcgccatgcttcatcagactct

SEQ ID NO: 10807 - DNA, 164 bp, Artificial Sequence; identical to SEQ ID NO: 10806
  Synthetic polynucleotide

SEQ ID NO: 10808 - DNA, 191 bp, Artificial Sequence
  Synthetic polynucleotide
atcatctcaccttgcctcctgtcagctataccgagtcacctgcaggaggacgctgtaaagggaagaaggacgctgtaaagggatcgaggacgctgtaaagggagacaggacgctgtaaagggactaaggacgctgtaaagggaactaggacgctgtaaagggatgcggcgcgccatgcttcatcagactct

SEQ ID NO: 10809 - DNA, 191 bp, Artificial Sequence; identical to SEQ ID NO: 10808
  Synthetic polynucleotide

SEQ ID NO: 10810 - DNA, 164 bp, Artificial Sequence
  Synthetic polynucleotide
atcatctcaccttgcctcctgtttatcaatctttcccgcctgcagggaaaaaatcagagaaaaaatctcggaaaaaatcgacgaaaaaatcctagaaaaaatcactgaaaaaatctgcgaaaaaatcgtagaaaaaatcggcgcgccatgcttcatcagactct

SEQ ID NO: 10811 - DNA, 164 bp, Artificial Sequence; identical to SEQ ID NO: 10810
  Synthetic polynucleotide

SEQ ID NO: 10812 - DNA, 197 bp, Artificial Sequence
  Synthetic polynucleotide
atcatctcaccttgcctcctgcacgagtcggtagtatccctgcagggggagggggcggggcagagggagggggcggggctcggggagggggcggggcgacgggagggggcggggcctagggagggggcggggcactgggagggggcggggctgcgggagggggcggggcgtaggcgcgccatgcttcatcagactct

SEQ ID NO: 10813 - DNA, 197 bp, Artificial Sequence; identical to SEQ ID NO: 10812
  Synthetic polynucleotide

SEQ ID NO: 10814 - DNA, 164 bp, Artificial Sequence
  Synthetic polynucleotide
atcatctcaccttgcctcctgttaccggcgatagtgctcctgcaggagtccatctagaagtccatcttcgagtccatctgacagtccatctctaagtccatctactagtccatcttgcagtccatctgtaagtccatctggcgcgccatgcttcatcagactct

SEQ ID NO: 10815 - DNA, 164 bp, Artificial Sequence; identical to SEQ ID NO: 10814
  Synthetic polynucleotide

SEQ ID NO: 10816 - DNA, 200 bp, Artificial Sequence
  Synthetic polynucleotide
atcatctcaccttgcctcctgaggttcgttatggcgggcctgcaggtgaccttgaaatgaccttgagatgaccttgaaatgaccttgtcgtgaccttgaaatgaccttggactgaccttgaaatgaccttgctatgaccttgaaatgaccttgacttgaccttgaaatgaccttgggcgcgccatgcttcatcagactct

SEQ ID NO: 10817 - DNA, 200 bp, Artificial Sequence; identical to SEQ ID NO: 10816
  Synthetic polynucleotide

SEQ ID NO: 10818 - DNA, 132 bp, Artificial Sequence
  Synthetic polynucleotide
atcatctcaccttgcctcctgactactgtagtggccaccctgcaggttggtagattggttcgttggtgacttggtctattggtactttggttgcttggtgtattggtggcgcgccatgcttcatcagactct

SEQ ID NO: 10819 - DNA, 132 bp, Artificial Sequence; identical to SEQ ID NO: 10818
  Synthetic polynucleotide

SEQ ID NO: 10820 - DNA, 196 bp, Artificial Sequence
  Synthetic polynucleotide
atcatctcaccttgcctcctgaggatgcgaagtatttacctgcaggcacttccggttccagacacttccggttcctcgcacttccggttccgaccacttccggttccctacacttccggttccactcacttccggttcctgccacttccggttccgtacacttccggttccggcgcgccatgcttcatcagactct

SEQ ID NO: 10821 - DNA, 196 bp, Artificial Sequence; identical to SEQ ID NO: 10820
  Synthetic polynucleotide

SEQ ID NO: 10822 - DNA, 191 bp, Artificial Sequence
  Synthetic polynucleotide
atcatctcaccttgcctcctgtataacggtccatacgtcctgcaggtaatcggtatttaattgagataatcggtatttaattgtcgtaatcggtatttaattggactaatcggtatttaattgctataatcggtatttaattgacttaatcggtatttaattgtgcggcgcgccatgcttcatcagactct

SEQ ID NO: 10823 - DNA, 191 bp, Artificial Sequence; identical to SEQ ID NO: 10822
  Synthetic polynucleotide

SEQ ID NO: 10824 - DNA, 164 bp, Artificial Sequence
  Synthetic polynucleotide
atcatctcaccttgcctcctgtcgacattcgaaacggacctgcagggggggcgggagagggggcgggtcggggggcggggacgggggcgggctagggggcgggactgggggcgggtgcgggggcggggtagggggcgggggcgcgccatgcttcatcagactct

SEQ ID NO: 10825 - DNA, 164 bp, Artificial Sequence; identical to SEQ ID NO: 10824
  Synthetic polynucleotide

SEQ ID NO: 10826 - DNA, 190 bp, Artificial Sequence
  Synthetic polynucleotide
atcatctcaccttgcctcctgattaagtcgcgaattggcctgcaggttatgtactaataaagattatgtactaataatcgttatgtactaataagacttatgtactaataactattatgtactaataaactttatgtactaataatgcttatgtactaataagtaggcgcgccatgcttcatcagactct

SEQ ID NO: 10827 - DNA, 190 bp, Artificial Sequence; identical to SEQ ID NO: 10826
  Synthetic polynucleotide

SEQ ID NO: 10828 - DNA, 188 bp, Artificial Sequence
  Synthetic polynucleotide
atcatctcaccttgcctcctggttacgaataagccgaccctgcaggggaccacccaggagaggaccacccaggtcgggaccacccagggacggaccacccaggctaggaccacccaggactggaccacccaggtgcggaccacccagggtaggaccacccaggggcgcgccatgcttcatcagactct

SEQ ID NO: 10829 - DNA, 188 bp, Artificial Sequence; identical to SEQ ID NO: 10828
  Synthetic polynucleotide

SEQ ID NO: 10830 - DNA, 185 bp, Artificial Sequence
  Synthetic polynucleotide
atcatctcaccttgcctcctgtaatgccgccttacacccctgcaggactatgaatgaatgatagaactatgaatgaatgattcgactatgaatgaatgatgacactatgaatgaatgatctaactatgaatgaatgatactactatgaatgaatgattgcggcgcgccatgcttcatcagactct

SEQ ID NO: 10831 - DNA, 185 bp, Artificial Sequence; identical to SEQ ID NO: 10830
  Synthetic polynucleotide

SEQ ID NO: 10832 - DNA, 197 bp, Artificial Sequence
  Synthetic polynucleotide
atcatctcaccttgcctcctgttacgcatagtattgagcctgcaggaatgcaattttttgaagaaatgcaattttttgatcgaatgcaattttttgagacaatgcaattttttgactaaatgcaattttttgaactaatgcaattttttgatgcaatgcaattttttgagtaggcgcgccatgcttcatcagactct

SEQ ID NO: 10833 - DNA, 197 bp, Artificial Sequence; identical to SEQ ID NO: 10832
  Synthetic polynucleotide

SEQ ID NO: 10834 - DNA, 164 bp, Artificial Sequence
  Synthetic polynucleotide
atcatctcaccttgcctcctgggagtgaagtatgctcacctgcagggggggcggaagagggggcggatcggggggcggagacgggggcggactagggggcggaactgggggcggatgcgggggcggagtagggggcggaggcgcgccatgcttcatcagactct

SEQ ID NO: 10835 - DNA, 164 bp, Artificial Sequence; identical to SEQ ID NO: 10834
  Synthetic polynucleotide

SEQ ID NO: 10836 - DNA, 156 bp, Artificial Sequence
  Synthetic polynucleotide
atcatctcaccttgcctcctgcaattccggttccgcaacctgcaggtcattagcagatcattagctcgtcattagcgactcattagcctatcattagcacttcattagctgctcattagcgtatcattagcggcgcgccatgcttcatcagactct

SEQ ID NO: 10837 - DNA, 156 bp, Artificial Sequence; identical to SEQ ID NO: 10836
  Synthetic polynucleotide

SEQ ID NO: 10838 - DNA, 185 bp, Artificial Sequence
  Synthetic polynucleotide
atcatctcaccttgcctcctgttgagtgctgcgtgaggcctgcaggacgttttacgactttaagaacgttttacgactttatcgacgttttacgactttagacacgttttacgactttactaacgttttacgactttaactacgttttacgactttatgcggcgcgccatgcttcatcagactct

SEQ ID NO: 10839 - DNA, 185 bp, Artificial Sequence; identical to SEQ ID NO: 10838
  Synthetic polynucleotide

SEQ ID NO: 10840 - DNA, 172 bp, Artificial Sequence
  Synthetic polynucleotide
atcatctcaccttgcctcctgggattctccatttatcccctgcaggccctatcacgagaccctatcacgtcgccctatcacggacccctatcacgctaccctatcacgactccctatcacgtgcccctatcacggtaccctatcacgggcgcgccatgcttcatcagactct

SEQ ID NO: 10841 - DNA, 172 bp, Artificial Sequence; identical to SEQ ID NO: 10840
  Synthetic polynucleotide

SEQ ID NO: 10842 - DNA, 172 bp, Artificial Sequence
  Synthetic polynucleotide
atcatctcaccttgcctcctgggatcataggaacagagcctgcaggtgggattaaaagatgggattaaatcgtgggattaaagactgggattaaactatgggattaaaacttgggattaaatgctgggattaaagtatgggattaaaggcgcgccatgcttcatcagactct

SEQ ID NO: 10843 - DNA, 172 bp, Artificial Sequence; identical to SEQ ID NO: 10842
  Synthetic polynucleotide

SEQ ID NO: 10844 - DNA, 196 bp, Artificial Sequence
  Synthetic polynucleotide
atcatctcaccttgcctcctgtaaatgccttcgttcgacctgcaggtttttagagataagaaataaagagatttttagagataagaaataaagtcgtttttagagataagaaataaaggactttttagagataagaaataaagctatttttagagataagaaataaagactggcgcgccatgcttcatcagactct

SEQ ID NO: 10845 - DNA, 196 bp, Artificial Sequence; identical to SEQ ID NO: 10844
  Synthetic polynucleotide

SEQ ID NO: 10846 - DNA, 180 bp, Artificial Sequence
  Synthetic polynucleotide
atcatctcaccttgcctcctgagtatgtcgtgtttggacctgcaggataaggaaaaaagaataaggaaaaatcgataaggaaaaagacataaggaaaaactaataaggaaaaaactataaggaaaaatgcataaggaaaaagtaataaggaaaaaggcgcgccatgcttcatcagactct

SEQ ID NO: 10847 - DNA, 180 bp, Artificial Sequence; identical to SEQ ID NO: 10846
  Synthetic polynucleotide

SEQ ID NO: 10848 - DNA, 188 bp, Artificial Sequence
  Synthetic polynucleotide
atcatctcaccttgcctcctgctttctacgttggctaccctgcagggtcagcaattttagagtcagcaatttttcggtcagcaattttgacgtcagcaattttctagtcagcaattttactgtcagcaatttttgcgtcagcaattttgtagtcagcaattttggcgcgccatgcttcatcagactct

SEQ ID NO: 10849 - DNA, 188 bp, Artificial Sequence; identical to SEQ ID NO: 10848
  Synthetic polynucleotide

SEQ ID NO: 10850 - DNA, 185 bp, Artificial Sequence
  Synthetic polynucleotide
atcatctcaccttgcctcctgtacacacttgtcccgatcctgcaggatcttgtttatgtataagaatcttgtttatgtatatcgatcttgtttatgtatagacatcttgtttatgtatactaatcttgtttatgtataactatcttgtttatgtatatgcggcgcgccatgcttcatcagactct

SEQ ID NO: 10851 - DNA, 185 bp, Artificial Sequence; identical to SEQ ID NO: 10850
  Synthetic polynucleotide

SEQ ID NO: 10852 - DNA, 196 bp, Artificial Sequence
  Synthetic polynucleotide
atcatctcaccttgcctcctggtatcagcaatgttcggcctgcaggctcatttgcatatagactcatttgcatattcgctcatttgcatatgacctcatttgcatatctactcatttgcatatactctcatttgcatattgcctcatttgcatatgtactcatttgcatatggcgcgccatgcttcatcagactct

SEQ ID NO: 10853 - DNA, 196 bp, Artificial Sequence; identical to SEQ ID NO: 10852
  Synthetic polynucleotide

SEQ ID NO: 10854 - DNA, 180 bp, Artificial Sequence
  Synthetic polynucleotide
atcatctcaccttgcctcctgggtaactatcaggtaggcctgcaggtaatttaattaagataatttaattatcgtaatttaattagactaatttaattactataatttaattaacttaatttaattatgctaatttaattagtataatttaattaggcgcgccatgcttcatcagactct

SEQ ID NO: 10855 - DNA, 180 bp, Artificial Sequence; identical to SEQ ID NO: 10854
  Synthetic polynucleotide

SEQ ID NO: 10856 - DNA, 190 bp, Artificial Sequence
  Synthetic polynucleotide
atcatctcaccttgcctcctgtatcaccacagtagggacctgcaggttgaggtaattagtagattgaggtaattagttcgttgaggtaattagtgacttgaggtaattagtctattgaggtaattagtactttgaggtaattagttgcttgaggtaattagtgtaggcgcgccatgcttcatcagactct

SEQ ID NO: 10857 - DNA, 190 bp, Artificial Sequence; identical to SEQ ID NO: 10856
  Synthetic polynucleotide

SEQ ID NO: 10858 - DNA, 164 bp, Artificial Sequence
  Synthetic polynucleotide
atcatctcaccttgcctcctgcgtattccaggtttatccctgcaggaattcaaatagaaattcaaattcgaattcaaatgacaattcaaatctaaattcaaatactaattcaaattgcaattcaaatgtaaattcaaatggcgcgccatgcttcatcagactct

SEQ ID NO: 10859 - DNA, 164 bp, Artificial Sequence; identical to SEQ ID NO: 10858
  Synthetic polynucleotide

SEQ ID NO: 10860 - DNA, 185 bp, Artificial Sequence
  Synthetic polynucleotide
atcatctcaccttgcctcctggggcatctgagacaccacctgcagggacctcattaataactagagacctcattaataacttcggacctcattaataactgacgacctcattaataactctagacctcattaataactactgacctcattaataacttgcggcgcgccatgcttcatcagactct

SEQ ID NO: 10861 - DNA, 185 bp, Artificial Sequence; identical to SEQ ID NO: 10860
  Synthetic polynucleotide

SEQ ID NO: 10862 - DNA, 156 bp, Artificial Sequence
  Synthetic polynucleotide
atcatctcaccttgcctcctgctagttatcccagatagcctgcaggtgacccctagatgaccccttcgtgacccctgactgacccctctatgacccctacttgaccccttgctgacccctgtatgacccctggcgcgccatgcttcatcagactct

SEQ ID NO: 10863 - DNA, 156 bp, Artificial Sequence; identical to SEQ ID NO: 10862
  Synthetic polynucleotide

SEQ ID NO: 10864 - DNA, 164 bp, Artificial Sequence
  Synthetic polynucleotide
atcatctcaccttgcctcctgccatcgaacaaagatggcctgcaggatgcccaccagaatgcccacctcgatgcccaccgacatgcccaccctaatgcccaccactatgcccacctgcatgcccaccgtaatgcccaccggcgcgccatgcttcatcagactct

SEQ ID NO: 10865 - DNA, 164 bp, Artificial Sequence; identical to SEQ ID NO: 10864
  Synthetic polynucleotide

SEQ ID NO: 10866 - DNA, 156 bp, Artificial Sequence
  Synthetic polynucleotide
atcatctcaccttgcctcctgtgtcaccaacgataggccctgcaggcacgcggtagacacgcggttcgcacgcggtgaccacgcggtctacacgcggtactcacgcggttgccacgcggtgtacacgcggtggcgcgccatgcttcatcagactct

SEQ ID NO: 10867 - DNA, 156 bp, Artificial Sequence; identical to SEQ ID NO: 10866
  Synthetic polynucleotide

SEQ ID NO: 10868 - DNA, 185 bp, Artificial Sequence
  Synthetic polynucleotide
atcatctcaccttgcctcctggagctgtttgataggagcctgcaggtaattttattaccttaagataattttattaccttatcgtaattttattaccttagactaattttattaccttactataattttattaccttaacttaattttattaccttatgcggcgcgccatgcttcatcagactct

SEQ ID NO: 10869 - DNA, 185 bp, Artificial Sequence; identical to SEQ ID NO: 10868
  Synthetic polynucleotide

SEQ ID NO: 10870 - DNA, 172 bp, Artificial Sequence
  Synthetic polynucleotide
atcatctcaccttgcctcctggaatcatcgcctaggaacctgcaggttcaaggccaagattcaaggccatcgttcaaggccagacttcaaggccactattcaaggccaactttcaaggccatgcttcaaggccagtattcaaggccaggcgcgccatgcttcatcagactct

SEQ ID NO: 10871 - DNA, 172 bp, Artificial Sequence; identical to SEQ ID NO: 10870
  Synthetic polynucleotide

SEQ ID NO: 10872 - DNA, 180 bp, Artificial Sequence
  Synthetic polynucleotide
atcatctcaccttgcctcctgtctgtcacctgcgagcacctgcagggacagctgcagagagacagctgcagtcggacagctgcaggacgacagctgcagctagacagctgcagactgacagctgcagtgcgacagctgcaggtagacagctgcagggcgcgccatgcttcatcagactct

SEQ ID NO: 10873 - DNA, 180 bp, Artificial Sequence; identical to SEQ ID NO: 10872
  Synthetic polynucleotide

SEQ ID NO: 10874 - DNA, 148 bp, Artificial Sequence
  Synthetic polynucleotide
atcatctcaccttgcctcctgtggtctaagatgcctagcctgcaggtattaatagatattaattcgtattaatgactattaatctatattaatacttattaattgctattaatgtatattaatggcgcgccatgcttcatcagactct

SEQ ID NO: 10875 - DNA, 148 bp, Artificial Sequence; identical to SEQ ID NO: 10874
  Synthetic polynucleotide

SEQ ID NO: 10876 - DNA, 156 bp, Artificial Sequence
  Synthetic polynucleotide
atcatctcaccttgcctcctgcggtggtggacttaaatcctgcaggttttgattagattttgatttcgttttgattgacttttgattctattttgattactttttgatttgcttttgattgtattttgattggcgcgccatgcttcatcagactct

SEQ ID NO: 10877 - DNA, 156 bp, Artificial Sequence; identical to SEQ ID NO: 10876
  Synthetic polynucleotide

SEQ ID NO: 10878 - DNA, 190 bp, Artificial Sequence
  Synthetic polynucleotide
atcatctcaccttgcctcctgccttcacggtgacgctacctgcagggaggggacagggagagagaggggacagggagtcggaggggacagggaggacgaggggacagggagctagaggggacagggagactgaggggacagggagtgcgaggggacagggaggtaggcgcgccatgcttcatcagactct

SEQ ID NO: 10879 - DNA, 190 bp, Artificial Sequence; identical to SEQ ID NO: 10878
  Synthetic polynucleotide

SEQ ID NO: 10880 - DNA, 185 bp, Artificial Sequence
  Synthetic polynucleotide
atcatctcaccttgcctcctgccgtgagtgaggtgtaccctgcaggcgaattttattgggttagacgaattttattgggtttcgcgaattttattgggttgaccgaattttattgggttctacgaattttattgggttactcgaattttattgggtttgcggcgcgccatgcttcatcagactct

SEQ ID NO: 10881 - DNA, 185 bp, Artificial Sequence; identical to SEQ ID NO: 10880
  Synthetic polynucleotide

SEQ ID NO: 10882 - DNA, 180 bp, Artificial Sequence
  Synthetic polynucleotide
atcatctcaccttgcctcctgctaaccgcatagactatcctgcagggtggtcacggtagagtggtcacggttcggtggtcacggtgacgtggtcacggtctagtggtcacggtactgtggtcacggttgcgtggtcacggtgtagtggtcacggtggcgcgccatgcttcatcagactct

SEQ ID NO: 10883 - DNA, 180 bp, Artificial Sequence; identical to SEQ ID NO: 10882
  Synthetic polynucleotide

SEQ ID NO: 10884 - DNA, 164 bp, Artificial Sequence
  Synthetic polynucleotide
atcatctcaccttgcctcctgacgcagggcataccttccctgcaggaatcgataaagaaatcgataatcgaatcgataagacaatcgataactaaatcgataaactaatcgataatgcaatcgataagtaaatcgataaggcgcgccatgcttcatcagactct

SEQ ID NO: 10885 - DNA, 164 bp, Artificial Sequence; identical to SEQ ID NO: 10884
  Synthetic polynucleotide

SEQ ID NO: 10886 - DNA, 156 bp, Artificial Sequence
  Synthetic polynucleotide
atcatctcaccttgcctcctgagattgcagtcatgcgtcctgcaggacaactccagaacaactcctcgacaactccgacacaactccctaacaactccactacaactcctgcacaactccgtaacaactccggcgcgccatgcttcatcagactct

SEQ ID NO: 10887 - DNA, 156 bp, Artificial Sequence; identical to SEQ ID NO: 10886
  Synthetic polynucleotide

SEQ ID NO: 10888 - DNA, 190 bp, Artificial Sequence
  Synthetic polynucleotide
atcatctcaccttgcctcctgacgcggtgttgagataacctgcaggatgccctagggcaaagaatgccctagggcaatcgatgccctagggcaagacatgccctagggcaactaatgccctagggcaaactatgccctagggcaatgcatgccctagggcaagtaggcgcgccatgcttcatcagactct

SEQ ID NO: 10889 - DNA, 190 bp, Artificial Sequence; identical to SEQ ID NO: 10888
  Synthetic polynucleotide

SEQ ID NO: 10890 - DNA, 185 bp, Artificial Sequence
  Synthetic polynucleotide
atcatctcaccttgcctcctgtggccgttatgtacgcgcctgcaggcgttgccatggtaacgagacgttgccatggtaacgtcgcgttgccatggtaacggaccgttgccatggtaacgctacgttgccatggtaacgactcgttgccatggtaacgtgcggcgcgccatgcttcatcagactct

SEQ ID NO: 10891 - DNA, 185 bp, Artificial Sequence; identical to SEQ ID NO: 10890
  Synthetic polynucleotide

SEQ ID NO: 10892 - DNA, 172 bp, Artificial Sequence
  Synthetic polynucleotide
atcatctcaccttgcctcctgtatcggtatctggacctcctgcaggccacctgggtagaccacctgggttcgccacctgggtgacccacctgggtctaccacctgggtactccacctgggttgcccacctgggtgtaccacctgggtggcgcgccatgcttcatcagactct

SEQ ID NO: 10893 - DNA, 172 bp, Artificial Sequence; identical to SEQ ID NO: 10892
  Synthetic polynucleotide

SEQ ID NO: 10894 - DNA, 197 bp, Artificial Sequence
  Synthetic polynucleotide
atcatctcaccttgcctcctggtgcaatagatcatacccctgcaggagaacaccctgtaccagaagaacaccctgtacctcgagaacaccctgtaccgacagaacaccctgtaccctaagaacaccctgtaccactagaacaccctgtacctgcagaacaccctgtaccgtaggcgcgccatgcttcatcagactct

SEQ ID NO: 10895 - DNA, 197 bp, Artificial Sequence; identical to SEQ ID NO: 10894
  Synthetic polynucleotide

SEQ ID NO: 10896 - DNA, 172 bp, Artificial Sequence
  Synthetic polynucleotide
atcatctcaccttgcctcctgaatcgactctgtcgacgcctgcaggttgattaatgagattgattaatgtcgttgattaatggacttgattaatgctattgattaatgactttgattaatgtgcttgattaatggtattgattaatgggcgcgccatgcttcatcagactct

SEQ ID NO: 10897 - DNA, 172 bp, Artificial Sequence; identical to SEQ ID NO: 10896
  Synthetic polynucleotide

SEQ ID NO: 10898 - DNA, 188 bp, Artificial Sequence
  Synthetic polynucleotide
atcatctcaccttgcctcctgatgtaaagagtgtcgctcctgcaggcaaaatggcggcagacaaaatggcggctcgcaaaatggcggcgaccaaaatggcggcctacaaaatggcggcactcaaaatggcggctgccaaaatggcggcgtacaaaatggcggcggcgcgccatgcttcatcagactct

SEQ ID NO: 10899 - DNA, 188 bp, Artificial Sequence; identical to SEQ ID NO: 10898
  Synthetic polynucleotide

SEQ ID NO: 10900 - DNA, 180 bp, Artificial Sequence
  Synthetic polynucleotide
atcatctcaccttgcctcctgtctgtgctaaacacttacctgcaggccttcccgcccagaccttcccgccctcgccttcccgcccgacccttcccgcccctaccttcccgcccactccttcccgccctgcccttcccgcccgtaccttcccgcccggcgcgccatgcttcatcagactct

SEQ ID NO: 10901 - DNA, 180 bp, Artificial Sequence; identical to SEQ ID NO: 10900
  Synthetic polynucleotide

SEQ ID NO: 10902 - DNA, 197 bp, Artificial Sequence
  Synthetic polynucleotide
atcatctcaccttgcctcctgtgccaacgtacggatgtcctgcaggctttaatcccttaacagactttaatcccttaactcgctttaatcccttaacgacctttaatcccttaacctactttaatcccttaacactctttaatcccttaactgcctttaatcccttaacgtaggcgcgccatgcttcatcagactct

SEQ ID NO: 10903 - DNA, 197 bp, Artificial Sequence; identical to SEQ ID NO: 10902
  Synthetic polynucleotide

SEQ ID NO: 10904 - DNA, 190 bp, Artificial Sequence
  Synthetic polynucleotide
atcatctcaccttgcctcctggccttacgactaatgtccctgcaggtttgattgatgcccagatttgattgatgccctcgtttgattgatgcccgactttgattgatgcccctatttgattgatgcccacttttgattgatgccctgctttgattgatgcccgtaggcgcgccatgcttcatcagactct

SEQ ID NO: 10905 - DNA, 190 bp, Artificial Sequence; identical to SEQ ID NO: 10904
  Synthetic polynucleotide

SEQ ID NO: 10906 - DNA, 196 bp, Artificial Sequence
  Synthetic polynucleotide
atcatctcaccttgcctcctgtctggcccggtatctagcctgcaggctcatttgcatacagactcatttgcatactcgctcatttgcatacgacctcatttgcatacctactcatttgcatacactctcatttgcatactgcctcatttgcatacgtactcatttgcatacggcgcgccatgcttcatcagactct

SEQ ID NO: 10907 - DNA, 196 bp, Artificial Sequence; identical to SEQ ID NO: 10906
  Synthetic polynucleotide

SEQ ID NO: 10908 - DNA, 188 bp, Artificial Sequence
  Synthetic polynucleotide
atcatctcaccttgcctcctggtcaccgtcacatataacctgcaggccgctcagccgcagaccgctcagccgctcgccgctcagccgcgacccgctcagccgcctaccgctcagccgcactccgctcagccgctgcccgctcagccgcgtaccgctcagccgcggcgcgccatgcttcatcagactct

SEQ ID NO: 10909 - DNA, 188 bp, Artificial Sequence; identical to SEQ ID NO: 10908
  Synthetic polynucleotide

SEQ ID NO: 10910 - DNA, 197 bp, Artificial Sequence
  Synthetic polynucleotide
atcatctcaccttgcctcctgcgcttagatagcaaggacctgcagggtgactgttactataagagtgactgttactatatcggtgactgttactatagacgtgactgttactatactagtgactgttactataactgtgactgttactatatgcgtgactgttactatagtaggcgcgccatgcttcatcagactct

SEQ ID NO: 10911 - DNA, 197 bp, Artificial Sequence; identical to SEQ ID NO: 10910
  Synthetic polynucleotide

SEQ ID NO: 10912 - DNA, 197 bp, Artificial Sequence
  Synthetic polynucleotide
atcatctcaccttgcctcctgcgacgacgatcgggaatcctgcaggtgaactcgttgacccagatgaactcgttgaccctcgtgaactcgttgacccgactgaactcgttgacccctatgaactcgttgacccacttgaactcgttgaccctgctgaactcgttgacccgtaggcgcgccatgcttcatcagactct

SEQ ID NO: 10913 - DNA, 197 bp, Artificial Sequence; identical to SEQ ID NO: 10912
  Synthetic polynucleotide

SEQ ID NO: 10914 - DNA, 180 bp, Artificial Sequence
  Synthetic polynucleotide
atcatctcaccttgcctcctggtagacattcggagttccctgcagggtacccgcatgagagtacccgcatgtcggtacccgcatggacgtacccgcatgctagtacccgcatgactgtacccgcatgtgcgtacccgcatggtagtacccgcatgggcgcgccatgcttcatcagactct

SEQ ID NO: 10915 - DNA, 180 bp, Artificial Sequence; identical to SEQ ID NO: 10914
  Synthetic polynucleotide

SEQ ID NO: 10916 - DNA, 156 bp, Artificial Sequence
  Synthetic polynucleotide
atcatctcaccttgcctcctgttccttccgatttgattcctgcaggtttatggcagatttatggctcgtttatggcgactttatggcctatttatggcacttttatggctgctttatggcgtatttatggcggcgcgccatgcttcatcagactct

SEQ ID NO: 10917 - DNA, 156 bp, Artificial Sequence; identical to SEQ ID NO: 10916
  Synthetic polynucleotide

SEQ ID NO: 10918 - DNA, 156 bp, Artificial Sequence
  Synthetic polynucleotide
atcatctcaccttgcctcctgtgatcaccctgcgttcgcctgcaggacattccaagaacattccatcgacattccagacacattccactaacattccaactacattccatgcacattccagtaacattccaggcgcgccatgcttcatcagactct

SEQ ID NO: 10919 - DNA, 156 bp, Artificial Sequence; identical to SEQ ID NO: 10918
  Synthetic polynucleotide

SEQ ID NO: 10920 - DNA, 190 bp, Artificial Sequence
  Synthetic polynucleotide
atcatctcaccttgcctcctggcttgggcagaattcatcctgcaggcacagcggggggtcagacacagcggggggtctcgcacagcggggggtcgaccacagcggggggtcctacacagcggggggtcactcacagcggggggtctgccacagcggggggtcgtaggcgcgccatgcttcatcagactct

SEQ ID NO: 10921 - DNA, 190 bp, Artificial Sequence; identical to SEQ ID NO: 10920
  Synthetic polynucleotide

SEQ ID NO: 10922 - DNA, 179 bp, Artificial Sequence
  Synthetic polynucleotide
atcatctcaccttgcctcctgagagggagtatttactacctgcaggctagtcacacctaggtgtgaaattagactagtcacacctaggtgtgaaatttcgctagtcacacctaggtgtgaaattgacctagtcacacctaggtgtgaaattctaggcgcgccatgcttcatcagactct

SEQ ID NO: 10923 - DNA, 179 bp, Artificial Sequence; identical to SEQ ID NO: 10922
  Synthetic polynucleotide

SEQ ID NO: 10924 - DNA, 156 bp, Artificial Sequence
  Synthetic polynucleotide
atcatctcaccttgcctcctgtttgtgttggtctctgccctgcaggggacgtgcagaggacgtgctcgggacgtgcgacggacgtgcctaggacgtgcactggacgtgctgcggacgtgcgtaggacgtgcggcgcgccatgcttcatcagactct

SEQ ID NO: 10925 - DNA, 156 bp, Artificial Sequence; identical to SEQ ID NO: 10924
  Synthetic polynucleotide

SEQ ID NO: 10926 - DNA, 180 bp, Artificial Sequence
  Synthetic polynucleotide
atcatctcaccttgcctcctgtctgggtttctgacatccctgcaggtacttccggtgagatacttccggtgtcgtacttccggtggactacttccggtgctatacttccggtgacttacttccggtgtgctacttccggtggtatacttccggtgggcgcgccatgcttcatcagactct

SEQ ID NO: 10927 - DNA, 180 bp, Artificial Sequence; identical to SEQ ID NO: 10926
  Synthetic polynucleotide

SEQ ID NO: 10928 - DNA, 180 bp, Artificial Sequence
  Synthetic polynucleotide
atcatctcaccttgcctcctgaaccagccatcagtaatcctgcaggctgccccctggagactgccccctggtcgctgccccctgggacctgccccctggctactgccccctggactctgccccctggtgcctgccccctgggtactgccccctggggcgcgccatgcttcatcagactct

SEQ ID NO: 10929 - DNA, 180 bp, Artificial Sequence; identical to SEQ ID NO: 10928
  Synthetic polynucleotide

SEQ ID NO: 10930 - DNA, 156 bp, Artificial Sequence
  Synthetic polynucleotide
atcatctcaccttgcctcctgctataagcacagtatggcctgcaggtatgtataagatatgtatatcgtatgtatagactatgtatactatatgtataacttatgtatatgctatgtatagtatatgtataggcgcgccatgcttcatcagactct

SEQ ID NO: 10931 - DNA, 156 bp, Artificial Sequence; identical to SEQ ID NO: 10930
  Synthetic polynucleotide

SEQ ID NO: 10932 - DNA, 172 bp, Artificial Sequence
  Synthetic polynucleotide
atcatctcaccttgcctcctgctacaaccaatgcgagccctgcaggcgaatattctagacgaatattcttcgcgaatattctgaccgaatattctctacgaatattctactcgaatattcttgccgaatattctgtacgaatattctggcgcgccatgcttcatcagactct

SEQ ID NO: 10933 - DNA, 172 bp, Artificial Sequence; identical to SEQ ID NO: 10932
  Synthetic polynucleotide

SEQ ID NO: 10934 - DNA, 190 bp, Artificial Sequence
  Synthetic polynucleotide
atcatctcaccttgcctcctgtacacctctaagcgaaacctgcaggccagccaatcagagagaccagccaatcagagtcgccagccaatcagaggacccagccaatcagagctaccagccaatcagagactccagccaatcagagtgcccagccaatcagaggtaggcgcgccatgcttcatcagactct

SEQ ID NO: 10935 - DNA, 190 bp, Artificial Sequence; identical to SEQ ID NO: 10934
  Synthetic polynucleotide

SEQ ID NO: 10936 - DNA, 191 bp, Artificial Sequence
  Synthetic polynucleotide
atcatctcaccttgcctcctgccagtgtttgttattgacctgcaggttcattaatccggttcaagattcattaatccggttcatcgttcattaatccggttcagacttcattaatccggttcactattcattaatccggttcaactttcattaatccggttcatgcggcgcgccatgcttcatcagactct

SEQ ID NO: 10937 - DNA, 191 bp, Artificial Sequence; identical to SEQ ID NO: 10936
  Synthetic polynucleotide

SEQ ID NO: 10938 - DNA, 196 bp, Artificial Sequence
  Synthetic polynucleotide
atcatctcaccttgcctcctgtgtttcctcaactcgtgcctgcagggccccccccctccccctctccgagagccccccccctccccctctccgtcggccccccccctccccctctccggacgccccccccctccccctctccgctagccccccccctccccctctccgactggcgcgccatgcttcatcagactct

SEQ ID NO: 10939 - DNA, 196 bp, Artificial Sequence; identical to SEQ ID NO: 10938
  Synthetic polynucleotide

SEQ ID NO: 10940 - DNA, 197 bp, Artificial Sequence
  Synthetic polynucleotide
atcatctcaccttgcctcctgaacttgctgcagacaaccctgcaggtatttcctggaattcagatatttcctggaattctcgtatttcctggaattcgactatttcctggaattcctatatttcctggaattcacttatttcctggaattctgctatttcctggaattcgtaggcgcgccatgcttcatcagactct

SEQ ID NO: 10941 - DNA, 197 bp, Artificial Sequence; identical to SEQ ID NO: 10940
  Synthetic polynucleotide

SEQ ID NO: 10942 - DNA, 180 bp, Artificial Sequence
  Synthetic polynucleotide
atcatctcaccttgcctcctggtcctaatgggacatgacctgcaggatgagtcatccagaatgagtcatcctcgatgagtcatccgacatgagtcatccctaatgagtcatccactatgagtcatcctgcatgagtcatccgtaatgagtcatccggcgcgccatgcttcatcagactct

SEQ ID NO: 10943 - DNA, 180 bp, Artificial Sequence; identical to SEQ ID NO: 10942
  Synthetic polynucleotide

SEQ ID NO: 10944 - DNA, 190 bp, Artificial Sequence
  Synthetic polynucleotide
atcatctcaccttgcctcctgctacgagctttggcgtccctgcaggtgtgaccttgggccagatgtgaccttgggcctcgtgtgaccttgggccgactgtgaccttgggccctatgtgaccttgggccacttgtgaccttgggcctgctgtgaccttgggccgtaggcgcgccatgcttcatcagactct

SEQ ID NO: 10945 - DNA, 190 bp, Artificial Sequence; identical to SEQ ID NO: 10944
  Synthetic polynucleotide

SEQ ID NO: 10946 - DNA, 200 bp, Artificial Sequence
  Synthetic polynucleotide
atcatctcaccttgcctcctgcacgacgcgaaagcttgcctgcaggtcacaccttaaaggtgtgaagatcacaccttaaaggtgtgatcgtcacaccttaaaggtgtgagactcacaccttaaaggtgtgactatcacaccttaaaggtgtgaacttcacaccttaaaggtgtgaggcgcgccatgcttcatcagactct

SEQ ID NO: 10947 - DNA, 200 bp, Artificial Sequence; identical to SEQ ID NO: 10946
  Synthetic polynucleotide

SEQ ID NO: 10948 - DNA, 164 bp, Artificial Sequence
  Synthetic polynucleotide
atcatctcaccttgcctcctgctcctaacagtcctcaccctgcaggcccatcaaaagacccatcaaatcgcccatcaaagaccccatcaaactacccatcaaaactcccatcaaatgccccatcaaagtacccatcaaaggcgcgccatgcttcatcagactct

SEQ ID NO: 10949 - DNA, 164 bp, Artificial Sequence; identical to SEQ ID NO: 10948
  Synthetic polynucleotide

SEQ ID NO: 10950 - DNA, 172 bp, Artificial Sequence
  Synthetic polynucleotide
atcatctcaccttgcctcctgacgtgggtagcataaatcctgcagggctgtgatttagagctgtgattttcggctgtgatttgacgctgtgatttctagctgtgatttactgctgtgattttgcgctgtgatttgtagctgtgatttggcgcgccatgcttcatcagactct

SEQ ID NO: 10951 - DNA, 172 bp, Artificial Sequence; identical to SEQ ID NO: 10950
  Synthetic polynucleotide

SEQ ID NO: 10952 - DNA, 180 bp, Artificial Sequence
  Synthetic polynucleotide
atcatctcaccttgcctcctgaggcgagcacagactctcctgcagggtaccatatggagagtaccatatggtcggtaccatatgggacgtaccatatggctagtaccatatggactgtaccatatggtgcgtaccatatgggtagtaccatatggggcgcgccatgcttcatcagactct

SEQ ID NO: 10953 - DNA, 180 bp, Artificial Sequence; identical to SEQ ID NO: 10952
  Synthetic polynucleotide

SEQ ID NO: 10954 - DNA, 200 bp, Artificial Sequence
  Synthetic polynucleotide
atcatctcaccttgcctcctgcacgaagctatgcattccctgcaggggcatgcctgggcatgtccagaggcatgcctgggcatgtcctcgggcatgcctgggcatgtccgacggcatgcctgggcatgtccctaggcatgcctgggcatgtccactggcatgcctgggcatgtccggcgcgccatgcttcatcagactct

SEQ ID NO: 10955 - DNA, 200 bp, Artificial Sequence; identical to SEQ ID NO: 10954
  Synthetic polynucleotide

SEQ ID NO: 10956 - DNA, 180 bp, Artificial Sequence
  Synthetic polynucleotide
atcatctcaccttgcctcctggcaaatttcccttcgtgcctgcaggaattaattagtagaaattaattagttcgaattaattagtgacaattaattagtctaaattaattagtactaattaattagttgcaattaattagtgtaaattaattagtggcgcgccatgcttcatcagactct

SEQ ID NO: 10957 - DNA, 180 bp, Artificial Sequence; identical to SEQ ID NO: 10956
  Synthetic polynucleotide

SEQ ID NO: 10958 - DNA, 148 bp, Artificial Sequence
  Synthetic polynucleotide
atcatctcaccttgcctcctgcgtgataccgtcaccgacctgcaggaggtcacagaaggtcactcgaggtcacgacaggtcacctaaggtcacactaggtcactgcaggtcacgtaaggtcacggcgcgccatgcttcatcagactct

SEQ ID NO: 10959 - DNA, 148 bp, Artificial Sequence; identical to SEQ ID NO: 10958
  Synthetic polynucleotide

SEQ ID NO: 10960 - DNA, 191 bp, Artificial Sequence
  Synthetic polynucleotide
atcatctcaccttgcctcctgctcgccgcatcataaagcctgcaggattcattaattgcttgtagaattcattaattgcttgttcgattcattaattgcttgtgacattcattaattgcttgtctaattcattaattgcttgtactattcattaattgcttgttgcggcgcgccatgcttcatcagactct

SEQ ID NO: 10961 - DNA, 191 bp, Artificial Sequence; identical to SEQ ID NO: 10960
  Synthetic polynucleotide

SEQ ID NO: 10962 - DNA, 190 bp, Artificial Sequence
  Synthetic polynucleotide
atcatctcaccttgcctcctgttagaatccgagggcgacctgcaggcccccgcccccgccagacccccgcccccgcctcgcccccgcccccgccgaccccccgcccccgccctacccccgcccccgccactcccccgcccccgcctgccccccgcccccgccgtaggcgcgccatgcttcatcagactct

SEQ ID NO: 10963 - DNA, 190 bp, Artificial Sequence; identical to SEQ ID NO: 10962
  Synthetic polynucleotide

SEQ ID NO: 10964 - DNA, 140 bp, Artificial Sequence
  Synthetic polynucleotide
atcatctcaccttgcctcctgccggccctaggatttcacctgcaggatccacagaatccactcgatccacgacatccacctaatccacactatccactgcatccacgtaatccacggcgcgccatgcttcatcagactct

SEQ ID NO: 10965 - DNA, 140 bp, Artificial Sequence; identical to SEQ ID NO: 10964
  Synthetic polynucleotide

SEQ ID NO: 10966 - DNA, 164 bp, Artificial Sequence
  Synthetic polynucleotide
atcatctcaccttgcctcctgacgagtaaacacgattacctgcaggacaaagggcagaacaaagggctcgacaaagggcgacacaaagggcctaacaaagggcactacaaagggctgcacaaagggcgtaacaaagggcggcgcgccatgcttcatcagactct

SEQ ID NO: 10967 - DNA, 164 bp, Artificial Sequence; identical to SEQ ID NO: 10966
  Synthetic polynucleotide

SEQ ID NO: 10968 - DNA, 172 bp, Artificial Sequence
  Synthetic polynucleotide
atcatctcaccttgcctcctgcttaggcaggacggtatcctgcaggtaacggtcaaagataacggtcaatcgtaacggtcaagactaacggtcaactataacggtcaaacttaacggtcaatgctaacggtcaagtataacggtcaaggcgcgccatgcttcatcagactct

SEQ ID NO: 10969 - DNA, 172 bp, Artificial Sequence; identical to SEQ ID NO: 10968
  Synthetic polynucleotide

SEQ ID NO: 10970 - DNA, 180 bp, Artificial Sequence
  Synthetic polynucleotide
atcatctcaccttgcctcctgggcggatgactctgatacctgcaggaccacctgttgagaaccacctgttgtcgaccacctgttggacaccacctgttgctaaccacctgttgactaccacctgttgtgcaccacctgttggtaaccacctgttgggcgcgccatgcttcatcagactct

SEQ ID NO: 10971 - DNA, 180 bp, Artificial Sequence; identical to SEQ ID NO: 10970
  Synthetic polynucleotide

SEQ ID NO: 10972 - DNA, 197 bp, Artificial Sequence
  Synthetic polynucleotide
atcatctcaccttgcctcctgtctaaggtgctagtcatcctgcaggaaagatgatgcaataagaaaagatgatgcaatatcgaaagatgatgcaatagacaaagatgatgcaatactaaaagatgatgcaataactaaagatgatgcaatatgcaaagatgatgcaatagtaggcgcgccatgcttcatcagactct

SEQ ID NO: 10973 - DNA, 197 bp, Artificial Sequence; identical to SEQ ID NO: 10972
  Synthetic polynucleotide

SEQ ID NO: 10974 - DNA, 188 bp, Artificial Sequence
  Synthetic polynucleotide
atcatctcaccttgcctcctgtcgaagaggctcagcagcctgcaggtttggcgccaatagatttggcgccaattcgtttggcgccaatgactttggcgccaatctatttggcgccaatacttttggcgccaattgctttggcgccaatgtatttggcgccaatggcgcgccatgcttcatcagactct

SEQ ID NO: 10975 - DNA, 188 bp, Artificial Sequence; identical to SEQ ID NO: 10974
  Synthetic polynucleotide

SEQ ID NO: 10976 - DNA, 172 bp, Artificial Sequence
  Synthetic polynucleotide
atcatctcaccttgcctcctgtgatggaatctttagcacctgcagggcggacgttaagagcggacgttatcggcggacgttagacgcggacgttactagcggacgttaactgcggacgttatgcgcggacgttagtagcggacgttaggcgcgccatgcttcatcagactct

SEQ ID NO: 10977 - DNA, 172 bp, Artificial Sequence; identical to SEQ ID NO: 10976
  Synthetic polynucleotide

SEQ ID NO: 10978 - DNA, 156 bp, Artificial Sequence
  Synthetic polynucleotide
atcatctcaccttgcctcctgtgccatgatcgtgttgccctgcaggccatatgtagaccatatgttcgccatatgtgacccatatgtctaccatatgtactccatatgttgcccatatgtgtaccatatgtggcgcgccatgcttcatcagactct

SEQ ID NO: 10979 - DNA, 156 bp, Artificial Sequence; identical to SEQ ID NO: 10978
  Synthetic polynucleotide

SEQ ID NO: 10980 - DNA, 197 bp, Artificial Sequence
  Synthetic polynucleotide
atcatctcaccttgcctcctgtaaatgcgtccttcgtacctgcaggaacaataacattgttagaaacaataacattgtttcgaacaataacattgttgacaacaataacattgttctaaacaataacattgttactaacaataacattgtttgcaacaataacattgttgtaggcgcgccatgcttcatcagactct

SEQ ID NO: 10981 - DNA, 197 bp, Artificial Sequence; identical to SEQ ID NO: 10980
  Synthetic polynucleotide

SEQ ID NO: 10982 - DNA, 197 bp, Artificial Sequence
  Synthetic polynucleotide
atcatctcaccttgcctcctggagagttccttgtaggacctgcaggacccccttatcagactatagaacccccttatcagactattcgacccccttatcagactatgacacccccttatcagactatctaacccccttatcagactatactacccccttatcagactattgcggcgcgccatgcttcatcagactct

SEQ ID NO: 10983 - DNA, 197 bp, Artificial Sequence; identical to SEQ ID NO: 10982
  Synthetic polynucleotide

SEQ ID NO: 10984 - DNA, 196 bp, Artificial Sequence
  Synthetic polynucleotide
atcatctcaccttgcctcctgttcttgggtatctcgggcctgcaggtgcccccggggcaagatgcccccggggcatcgtgcccccggggcagactgcccccggggcactatgcccccggggcaacttgcccccggggcatgctgcccccggggcagtatgcccccggggcaggcgcgccatgcttcatcagactct

SEQ ID NO: 10985 - DNA, 196 bp, Artificial Sequence; identical to SEQ ID NO: 10984
  Synthetic polynucleotide

SEQ ID NO: 10986 - DNA, 185 bp, Artificial Sequence
  Synthetic polynucleotide
atcatctcaccttgcctcctggtcttgcatgcattgatcctgcagggaagaacaggtgtccgagagaagaacaggtgtccgtcggaagaacaggtgtccggacgaagaacaggtgtccgctagaagaacaggtgtccgactgaagaacaggtgtccgtgcggcgcgccatgcttcatcagactct

SEQ ID NO: 10987 - DNA, 185 bp, Artificial Sequence; identical to SEQ ID NO: 10986
  Synthetic polynucleotide

SEQ ID NO: 10988 - DNA, 185 bp, Artificial Sequence
  Synthetic polynucleotide
atcatctcaccttgcctcctgcgcaggaaagtctagagcctgcaggtaagggttgcgtgcccagataagggttgcgtgccctcgtaagggttgcgtgcccgactaagggttgcgtgcccctataagggttgcgtgcccacttaagggttgcgtgccctgcggcgcgccatgcttcatcagactct

SEQ ID NO: 10989 - DNA, 185 bp, Artificial Sequence; identical to SEQ ID NO: 10988
  Synthetic polynucleotide

SEQ ID NO: 10990 - DNA, 196 bp, Artificial Sequence
  Synthetic polynucleotide
atcatctcaccttgcctcctgagcccgctattaagattcctgcaggcttccaaaatgacagacttccaaaatgactcgcttccaaaatgacgaccttccaaaatgacctacttccaaaatgacactcttccaaaatgactgccttccaaaatgacgtacttccaaaatgacggcgcgccatgcttcatcagactct

SEQ ID NO: 10991 - DNA, 196 bp, Artificial Sequence; identical to SEQ ID NO: 10990
  Synthetic polynucleotide

SEQ ID NO: 10992 - DNA, 185 bp, Artificial Sequence
  Synthetic polynucleotide
atcatctcaccttgcctcctgcggcgaaaggttatatacctgcagggtgcactaattaagacagagtgcactaattaagactcggtgcactaattaagacgacgtgcactaattaagacctagtgcactaattaagacactgtgcactaattaagactgcggcgcgccatgcttcatcagactct

SEQ ID NO: 10993 - DNA, 185 bp, Artificial Sequence; identical to SEQ ID NO: 10992
  Synthetic polynucleotide

SEQ ID NO: 10994 - DNA, 172 bp, Artificial Sequence
  Synthetic polynucleotide
atcatctcaccttgcctcctgagactcgtaagatctttcctgcaggaggtgtgaaaagaaggtgtgaaatcgaggtgtgaaagacaggtgtgaaactaaggtgtgaaaactaggtgtgaaatgcaggtgtgaaagtaaggtgtgaaaggcgcgccatgcttcatcagactct

SEQ ID NO: 10995 - DNA, 172 bp, Artificial Sequence; identical to SEQ ID NO: 10994
  Synthetic polynucleotide

SEQ ID NO: 10996 - DNA, 156 bp, Artificial Sequence
  Synthetic polynucleotide
atcatctcaccttgcctcctgaatagccagcgtcgatccctgcaggatttttctagaatttttcttcgatttttctgacatttttctctaatttttctactatttttcttgcatttttctgtaatttttctggcgcgccatgcttcatcagactct

SEQ ID NO: 10997 - DNA, 156 bp, Artificial Sequence; identical to SEQ ID NO: 10996
  Synthetic polynucleotide

SEQ ID NO: 10998 - DNA, 196 bp, Artificial Sequence
  Synthetic polynucleotide
atcatctcaccttgcctcctgttccggagacggtttgccctgcagggaacgttctagaaagagaacgttctagaatcggaacgttctagaagacgaacgttctagaactagaacgttctagaaactgaacgttctagaatgcgaacgttctagaagtagaacgttctagaaggcgcgccatgcttcatcagactct

SEQ ID NO: 10999 - DNA, 196 bp, Artificial Sequence; identical to SEQ ID NO: 10998
  Synthetic polynucleotide

SEQ ID NO: 11000 - DNA, 186 bp, Artificial Sequence
  Synthetic polynucleotide
atcatctcaccttgcctcctggattgtgtttgactttccctgcaggagggaaaataattttccattagaagggaaaataattttccatttcgagggaaaataattttccattgacagggaaaataattttccattctaagggaaaataattttccattactggcgcgccatgcttcatcagactct

SEQ ID NO: 11001 - DNA, 186 bp, Artificial Sequence; identical to SEQ ID NO: 11000
  Synthetic polynucleotide

SEQ ID NO: 11002 - DNA, 196 bp, Artificial Sequence
  Synthetic polynucleotide
atcatctcaccttgcctcctggcagcgtaggacgttctcctgcaggggtcaaaggtcacagaggtcaaaggtcactcgggtcaaaggtcacgacggtcaaaggtcacctaggtcaaaggtcacactggtcaaaggtcactgcggtcaaaggtcacgtaggtcaaaggtcacggcgcgccatgcttcatcagactct

SEQ ID NO: 11003 - DNA, 196 bp, Artificial Sequence; identical to SEQ ID NO: 11002
  Synthetic polynucleotide

SEQ ID NO: 11004 - DNA, 188 bp, Artificial Sequence
  Synthetic polynucleotide
atcatctcaccttgcctcctgcagtgatctcacgaaatcctgcaggtttggcgccaaaagatttggcgccaaatcgtttggcgccaaagactttggcgccaaactatttggcgccaaaacttttggcgccaaatgctttggcgccaaagtatttggcgccaaaggcgcgccatgcttcatcagactct

SEQ ID NO: 11005 - DNA, 188 bp, Artificial Sequence; identical to SEQ ID NO: 11004
  Synthetic polynucleotide

SEQ ID NO: 11006 - DNA, 197 bp, Artificial Sequence
  Synthetic polynucleotide
atcatctcaccttgcctcctggagtaccttcagcacgacctgcaggtgaccttttgaccttagatgaccttttgacctttcgtgaccttttgaccttgactgaccttttgaccttctatgaccttttgaccttacttgaccttttgacctttgctgaccttttgaccttgtaggcgcgccatgcttcatcagactct

SEQ ID NO: 11007 - DNA, 197 bp, Artificial Sequence; identical to SEQ ID NO: 11006
  Synthetic polynucleotide

SEQ ID NO: 11008 - DNA, 180 bp, Artificial Sequence
  Synthetic polynucleotide
atcatctcaccttgcctcctgaatatgcctatagcccgcctgcaggatgactcacccagaatgactcaccctcgatgactcacccgacatgactcacccctaatgactcacccactatgactcaccctgcatgactcacccgtaatgactcacccggcgcgccatgcttcatcagactct

SEQ ID NO: 11009 - DNA, 180 bp, Artificial Sequence; identical to SEQ ID NO: 11008
  Synthetic polynucleotide

SEQ ID NO: 11010 - DNA, 191 bp, Artificial Sequence
  Synthetic polynucleotide
atcatctcaccttgcctcctgcaagactagagtcactccctgcaggaaattaacggttttcaaagaaaattaacggttttcaatcgaaattaacggttttcaagacaaattaacggttttcaactaaaattaacggttttcaaactaaattaacggttttcaatgcggcgcgccatgcttcatcagactct

SEQ ID NO: 11011 - DNA, 191 bp, Artificial Sequence; identical to SEQ ID NO: 11010
  Synthetic polynucleotide

SEQ ID NO: 11012 - DNA, 172 bp, Artificial Sequence
  Synthetic polynucleotide
atcatctcaccttgcctcctgtatggtctgggtaatcccctgcagggtacctacctagagtacctaccttcggtacctacctgacgtacctacctctagtacctacctactgtacctaccttgcgtacctacctgtagtacctacctggcgcgccatgcttcatcagactct

SEQ ID NO: 11013 - DNA, 172 bp, Artificial Sequence; identical to SEQ ID NO: 11012
  Synthetic polynucleotide

SEQ ID NO: 11014 - DNA, 197 bp, Artificial Sequence
  Synthetic polynucleotide
atcatctcaccttgcctcctgtcgattaaatctacggccctgcaggtgaccttttgacctcagatgaccttttgacctctcgtgaccttttgacctcgactgaccttttgacctcctatgaccttttgacctcacttgaccttttgacctctgctgaccttttgacctcgtaggcgcgccatgcttcatcagactct

SEQ ID NO: 11015 - DNA, 197 bp, Artificial Sequence; identical to SEQ ID NO: 11014
  Synthetic polynucleotide

SEQ ID NO: 11016 - DNA, 197 bp, Artificial Sequence
  Synthetic polynucleotide
atcatctcaccttgcctcctgtcctttgcccacccgatcctgcaggcagaccccccacagaagacagaccccccacagatcgcagaccccccacagagaccagaccccccacagactacagaccccccacagaactcagaccccccacagatgccagaccccccacagagtaggcgcgccatgcttcatcagactct

SEQ ID NO: 11017 - DNA, 197 bp, Artificial Sequence; identical to SEQ ID NO: 11016
  Synthetic polynucleotide

SEQ ID NO: 11018 - DNA, 156 bp, Artificial Sequence
  Synthetic polynucleotide
atcatctcaccttgcctcctgtgccagagagcctccttcctgcaggtttatgacagatttatgactcgtttatgacgactttatgacctatttatgacacttttatgactgctttatgacgtatttatgacggcgcgccatgcttcatcagactct

SEQ ID NO: 11019 - DNA, 156 bp, Artificial Sequence; identical to SEQ ID NO: 11018
  Synthetic polynucleotide

SEQ ID NO: 11020 - DNA, 148 bp, Artificial Sequence
  Synthetic polynucleotide
atcatctcaccttgcctcctgaactgggtgtttagtaacctgcaggtcattagagatcattagtcgtcattaggactcattagctatcattagacttcattagtgctcattaggtatcattagggcgcgccatgcttcatcagactct

SEQ ID NO: 11021 - DNA, 148 bp, Artificial Sequence; identical to SEQ ID NO: 11020
  Synthetic polynucleotide

SEQ ID NO: 11022 - DNA, 197 bp, Artificial Sequence
  Synthetic polynucleotide
atcatctcaccttgcctcctgatagcttcacatgccgtcctgcagggtataaaaggcggggagagtataaaaggcggggtcggtataaaaggcgggggacgtataaaaggcggggctagtataaaaggcggggactgtataaaaggcggggtgcgtataaaaggcgggggtaggcgcgccatgcttcatcagactct

SEQ ID NO: 11023 - DNA, 197 bp, Artificial Sequence; identical to SEQ ID NO: 11022
  Synthetic polynucleotide

SEQ ID NO: 11024 - DNA, 188 bp, Artificial Sequence
  Synthetic polynucleotide
atcatctcaccttgcctcctgataacttgagcagtggccctgcaggggccatctgccgagaggccatctgccgtcgggccatctgccggacggccatctgccgctaggccatctgccgactggccatctgccgtgcggccatctgccggtaggccatctgccgggcgcgccatgcttcatcagactct

SEQ ID NO: 11025 - DNA, 188 bp, Artificial Sequence; identical to SEQ ID NO: 11024
  Synthetic polynucleotide

SEQ ID NO: 11026 - DNA, 164 bp, Artificial Sequence
  Synthetic polynucleotide
atcatctcaccttgcctcctgagttagtggctgggagccctgcagggccccaggcagagccccaggctcggccccaggcgacgccccaggcctagccccaggcactgccccaggctgcgccccaggcgtagccccaggcggcgcgccatgcttcatcagactct

SEQ ID NO: 11027 - DNA, 164 bp, Artificial Sequence; identical to SEQ ID NO: 11026
  Synthetic polynucleotide

SEQ ID NO: 11028 - DNA, 197 bp, Artificial Sequence
  Synthetic polynucleotide
atcatctcaccttgcctcctgttacattcgctcagacgcctgcaggctaattagcgctaattaaagactaattagcgctaattaatcgctaattagcgctaattaagacctaattagcgctaattaactactaattagcgctaattaaactctaattagcgctaattaatgcggcgcgccatgcttcatcagactct

SEQ ID NO: 11029 - DNA, 197 bp, Artificial Sequence; identical to SEQ ID NO: 11028
  Synthetic polynucleotide

SEQ ID NO: 11030 - DNA, 186 bp, Artificial Sequence
  Synthetic polynucleotide
atcatctcaccttgcctcctgtgagtaatgctgttggacctgcaggtgtttcccaattcggaaatgagatgtttcccaattcggaaatgtcgtgtttcccaattcggaaatggactgtttcccaattcggaaatgctatgtttcccaattcggaaatgactggcgcgccatgcttcatcagactct

SEQ ID NO: 11031 - DNA, 186 bp, Artificial Sequence; identical to SEQ ID NO: 11030
  Synthetic polynucleotide

SEQ ID NO: 11032 - DNA, 148 bp, Artificial Sequence
  Synthetic polynucleotide
atcatctcaccttgcctcctggataaactctcgcaacccctgcaggtcattaaagatcattaatcgtcattaagactcattaactatcattaaacttcattaatgctcattaagtatcattaaggcgcgccatgcttcatcagactct

SEQ ID NO: 11033 - DNA, 148 bp, Artificial Sequence; identical to SEQ ID NO: 11032
  Synthetic polynucleotide

SEQ ID NO: 11034 - DNA, 190 bp, Artificial Sequence
  Synthetic polynucleotide
atcatctcaccttgcctcctgttcagggcaattccgcacctgcaggtgacttttgactttagatgacttttgacttttcgtgacttttgactttgactgacttttgactttctatgacttttgactttacttgacttttgacttttgctgacttttgactttgtaggcgcgccatgcttcatcagactct

SEQ ID NO: 11035 - DNA, 190 bp, Artificial Sequence; identical to SEQ ID NO: 11034
  Synthetic polynucleotide

SEQ ID NO: 11036 - DNA, 196 bp, Artificial Sequence
  Synthetic polynucleotide
atcatctcaccttgcctcctggtggtggcgaagttgagcctgcaggtacagactgttctagatacagactgttcttcgtacagactgttctgactacagactgttctctatacagactgttctacttacagactgttcttgctacagactgttctgtatacagactgttctggcgcgccatgcttcatcagactct

SEQ ID NO: 11037 - DNA, 196 bp, Artificial Sequence; identical to SEQ ID NO: 11036
  Synthetic polynucleotide

SEQ ID NO: 11038 - DNA, 172 bp, Artificial Sequence
  Synthetic polynucleotide
atcatctcaccttgcctcctgggattgaccctcgctgtcctgcaggataattcataagaataattcatatcgataattcatagacataattcatactaataattcataactataattcatatgcataattcatagtaataattcataggcgcgccatgcttcatcagactct

SEQ ID NO: 11039 - DNA, 172 bp, Artificial Sequence; identical to SEQ ID NO: 11038
  Synthetic polynucleotide

SEQ ID NO: 11040 - DNA, 164 bp, Artificial Sequence
  Synthetic polynucleotide
atcatctcaccttgcctcctgacgctctaacgccacaacctgcaggaataaactcagaaataaactctcgaataaactcgacaataaactcctaaataaactcactaataaactctgcaataaactcgtaaataaactcggcgcgccatgcttcatcagactct

SEQ ID NO: 11041 - DNA, 164 bp, Artificial Sequence; identical to SEQ ID NO: 11040
  Synthetic polynucleotide

SEQ ID NO: 11042 - DNA, 172 bp, Artificial Sequence
  Synthetic polynucleotide
atcatctcaccttgcctcctgggaatcttgactcctaacctgcaggtctaattagcagatctaattagctcgtctaattagcgactctaattagcctatctaattagcacttctaattagctgctctaattagcgtatctaattagcggcgcgccatgcttcatcagactct

SEQ ID NO: 11043 - DNA, 172 bp, Artificial Sequence; identical to SEQ ID NO: 11042
  Synthetic polynucleotide

SEQ ID NO: 11044 - DNA, 180 bp, Artificial Sequence
  Synthetic polynucleotide
atcatctcaccttgcctcctgacgggtttagagacctacctgcagggatgactcatcagagatgactcatctcggatgactcatcgacgatgactcatcctagatgactcatcactgatgactcatctgcgatgactcatcgtagatgactcatcggcgcgccatgcttcatcagactct

SEQ ID NO: 11045 - DNA, 180 bp, Artificial Sequence; identical to SEQ ID NO: 11044
  Synthetic polynucleotide

SEQ ID NO: 11046 - DNA, 198 bp, Artificial Sequence
  Synthetic polynucleotide
atcatctcaccttgcctcctggctgctgcatctcacgtcctgcagggccgccatcttgggtgcgggcaaagagccgccatcttgggtgcgggcaatcggccgccatcttgggtgcgggcaagacgccgccatcttgggtgcgggcaactagccgccatcttgggtgcgggcaaggcgcgccatgcttcatcagactct

SEQ ID NO: 11047 - DNA, 198 bp, Artificial Sequence; identical to SEQ ID NO: 11046
  Synthetic polynucleotide

SEQ ID NO: 11048 - DNA, 172 bp, Artificial Sequence
  Synthetic polynucleotide
atcatctcaccttgcctcctgctcatgttcctaccttacctgcaggaaccacgtgaagaaaccacgtgatcgaaccacgtgagacaaccacgtgactaaaccacgtgaactaaccacgtgatgcaaccacgtgagtaaaccacgtgaggcgcgccatgcttcatcagactct

SEQ ID NO: 11049 - DNA, 172 bp, Artificial Sequence; identical to SEQ ID NO: 11048
  Synthetic polynucleotide

SEQ ID NO: 11050 - DNA, 172 bp, Artificial Sequence
  Synthetic polynucleotide
atcatctcaccttgcctcctggtgtaagcactttgaggcctgcaggagccacttaaagaagccacttaatcgagccacttaagacagccacttaactaagccacttaaactagccacttaatgcagccacttaagtaagccacttaaggcgcgccatgcttcatcagactct

SEQ ID NO: 11051 - DNA, 172 bp, Artificial Sequence; identical to SEQ ID NO: 11050
  Synthetic polynucleotide

SEQ ID NO: 11052 - DNA, 197 bp, Artificial Sequence
  Synthetic polynucleotide
atcatctcaccttgcctcctgcgcgtcctgatcttgatcctgcaggacccaagatggcggcagaacccaagatggcggctcgacccaagatggcggcgacacccaagatggcggcctaacccaagatggcggcactacccaagatggcggctgcacccaagatggcggcgtaggcgcgccatgcttcatcagactct

SEQ ID NO: 11053 - DNA, 197 bp, Artificial Sequence; identical to SEQ ID NO: 11052
  Synthetic polynucleotide

SEQ ID NO: 11054 - DNA, 172 bp, Artificial Sequence
  Synthetic polynucleotide
atcatctcaccttgcctcctgcgatgataacggagtctcctgcaggaaccacgtggagaaaccacgtggtcgaaccacgtgggacaaccacgtggctaaaccacgtggactaaccacgtggtgcaaccacgtgggtaaaccacgtggggcgcgccatgcttcatcagactct

SEQ ID NO: 11055 - DNA, 172 bp, Artificial Sequence; identical to SEQ ID NO: 11054
  Synthetic polynucleotide

SEQ ID NO: 11056 - DNA, 191 bp, Artificial Sequence
  Synthetic polynucleotide
atcatctcaccttgcctcctgcccggtaaacagttaggcctgcagggcaacctcattatgtttagagcaacctcattatgttttcggcaacctcattatgtttgacgcaacctcattatgtttctagcaacctcattatgtttactgcaacctcattatgttttgcggcgcgccatgcttcatcagactct

SEQ ID NO: 11057 - DNA, 191 bp, Artificial Sequence; identical to SEQ ID NO: 11056
  Synthetic polynucleotide

SEQ ID NO: 11058 - DNA, 185 bp, Artificial Sequence
  Synthetic polynucleotide
atcatctcaccttgcctcctgggatggtcgtgtatcgccctgcagggaattaattaattaaaagagaattaattaattaaatcggaattaattaattaaagacgaattaattaattaaactagaattaattaattaaaactgaattaattaattaaatgcggcgcgccatgcttcatcagactct

SEQ ID NO: 11059 - DNA, 185 bp, Artificial Sequence; identical to SEQ ID NO: 11058
  Synthetic polynucleotide

SEQ ID NO: 11060 - DNA, 197 bp, Artificial Sequence
  Synthetic polynucleotide
atcatctcaccttgcctcctgtttgtctcacccgagctcctgcaggatgctgagtcagcgaagaatgctgagtcagcgatcgatgctgagtcagcgagacatgctgagtcagcgactaatgctgagtcagcgaactatgctgagtcagcgatgcatgctgagtcagcgagtaggcgcgccatgcttcatcagactct

SEQ ID NO: 11061 - DNA, 197 bp, Artificial Sequence; identical to SEQ ID NO: 11060
  Synthetic polynucleotide

SEQ ID NO: 11062 - DNA, 172 bp, Artificial Sequence
  Synthetic polynucleotide
atcatctcaccttgcctcctgcgtcaacgcgtgtacgacctgcaggacgcgccaaaagaacgcgccaaatcgacgcgccaaagacacgcgccaaactaacgcgccaaaactacgcgccaaatgcacgcgccaaagtaacgcgccaaaggcgcgccatgcttcatcagactct

SEQ ID NO: 11063 - DNA, 172 bp, Artificial Sequence; identical to SEQ ID NO: 11062
  Synthetic polynucleotide

SEQ ID NO: 11064 - DNA, 197 bp, Artificial Sequence
  Synthetic polynucleotide
atcatctcaccttgcctcctgatctgggatcgttatcgcctgcagggcaacaatgtatcaaagagcaacaatgtatcaatcggcaacaatgtatcaagacgcaacaatgtatcaactagcaacaatgtatcaaactgcaacaatgtatcaatgcgcaacaatgtatcaagtaggcgcgccatgcttcatcagactct

SEQ ID NO: 11065 - DNA, 197 bp, Artificial Sequence; identical to SEQ ID NO: 11064
  Synthetic polynucleotide

SEQ ID NO: 11066 - DNA, 156 bp, Artificial Sequence
  Synthetic polynucleotide
atcatctcaccttgcctcctgtattacgtctccgacgccctgcaggtcattaagagatcattaagtcgtcattaaggactcattaagctatcattaagacttcattaagtgctcattaaggtatcattaagggcgcgccatgcttcatcagactct

SEQ ID NO: 11067 - DNA, 156 bp, Artificial Sequence; identical to SEQ ID NO: 11066
  Synthetic polynucleotide

SEQ ID NO: 11068 - DNA, 188 bp, Artificial Sequence
  Synthetic polynucleotide
atcatctcaccttgcctcctgttaaccttcgaatacagcctgcaggcgtacgtgcggcagacgtacgtgcggctcgcgtacgtgcggcgaccgtacgtgcggcctacgtacgtgcggcactcgtacgtgcggctgccgtacgtgcggcgtacgtacgtgcggcggcgcgccatgcttcatcagactct

SEQ ID NO: 11069 - DNA, 188 bp, Artificial Sequence; identical to SEQ ID NO: 11068
  Synthetic polynucleotide

SEQ ID NO: 11070 - DNA, 156 bp, Artificial Sequence
  Synthetic polynucleotide
atcatctcaccttgcctcctgactagagttcactgagccctgcaggtcattaacagatcattaactcgtcattaacgactcattaacctatcattaacacttcattaactgctcattaacgtatcattaacggcgcgccatgcttcatcagactct

SEQ ID NO: 11071 - DNA, 156 bp, Artificial Sequence; identical to SEQ ID NO: 11070
  Synthetic polynucleotide

SEQ ID NO: 11072 - DNA, 197 bp, Artificial Sequence
  Synthetic polynucleotide
atcatctcaccttgcctcctgacggtgtactctcagcccctgcaggttgacctttggacccagattgacctttggaccctcgttgacctttggacccgacttgacctttggacccctattgacctttggacccactttgacctttggaccctgcttgacctttggacccgtaggcgcgccatgcttcatcagactct

SEQ ID NO: 11073 - DNA, 197 bp, Artificial Sequence; identical to SEQ ID NO: 11072
  Synthetic polynucleotide

SEQ ID NO: 11074 - DNA, 164 bp, Artificial Sequence
  Synthetic polynucleotide
atcatctcaccttgcctcctggagagggatagctgcaccctgcaggttttattgcagattttattgctcgttttattgcgacttttattgcctattttattgcactttttattgctgcttttattgcgtattttattgcggcgcgccatgcttcatcagactct

SEQ ID NO: 11075 - DNA, 164 bp, Artificial Sequence; identical to SEQ ID NO: 11074
  Synthetic polynucleotide

SEQ ID NO: 11076 - DNA, 188 bp, Artificial Sequence
  Synthetic polynucleotide
atcatctcaccttgcctcctgttcatgtccgctgtactcctgcaggggtaattatttcagaggtaattatttctcgggtaattatttcgacggtaattatttcctaggtaattatttcactggtaattatttctgcggtaattatttcgtaggtaattatttcggcgcgccatgcttcatcagactct

SEQ ID NO: 11077 - DNA, 188 bp, Artificial Sequence; identical to SEQ ID NO: 11076
  Synthetic polynucleotide

SEQ ID NO: 11078 - DNA, 197 bp, Artificial Sequence
  Synthetic polynucleotide
atcatctcaccttgcctcctgactcttgcacacatcaccctgcaggtggggtcactggcggtcaagatggggtcactggcggtcatcgtggggtcactggcggtcagactggggtcactggcggtcactatggggtcactggcggtcaacttggggtcactggcggtcatgcggcgcgccatgcttcatcagactct

SEQ ID NO: 11079 - DNA, 197 bp, Artificial Sequence; identical to SEQ ID NO: 11078
  Synthetic polynucleotide

SEQ ID NO: 11080 - DNA, 148 bp, Artificial Sequence
  Synthetic polynucleotide
atcatctcaccttgcctcctgccagtctgcagcactttcctgcaggttatcttagattatctttcgttatcttgacttatcttctattatcttactttatctttgcttatcttgtattatcttggcgcgccatgcttcatcagactct

SEQ ID NO: 11081 - DNA, 148 bp, Artificial Sequence; identical to SEQ ID NO: 11080
  Synthetic polynucleotide

SEQ ID NO: 11082 - DNA, 188 bp, Artificial Sequence
  Synthetic polynucleotide
atcatctcaccttgcctcctggttggacctactggtttcctgcaggattcacctgtacagaattcacctgtactcgattcacctgtacgacattcacctgtacctaattcacctgtacactattcacctgtactgcattcacctgtacgtaattcacctgtacggcgcgccatgcttcatcagactct

SEQ ID NO: 11083 - DNA, 188 bp, Artificial Sequence; identical to SEQ ID NO: 11082
  Synthetic polynucleotide

SEQ ID NO: 11084 - DNA, 197 bp, Artificial Sequence
  Synthetic polynucleotide
atcatctcaccttgcctcctgactgcaaaccctctttccctgcagggttggcataggctggcacagagttggcataggctggcactcggttggcataggctggcacgacgttggcataggctggcacctagttggcataggctggcacactgttggcataggctggcactgcggcgcgccatgcttcatcagactct

SEQ ID NO: 11085 - DNA, 197 bp, Artificial Sequence; identical to SEQ ID NO: 11084
  Synthetic polynucleotide

SEQ ID NO: 11086 - DNA, 188 bp, Artificial Sequence
  Synthetic polynucleotide
atcatctcaccttgcctcctgggctggatgtggtcgaacctgcaggtaaattatgcatagataaattatgcattcgtaaattatgcatgactaaattatgcatctataaattatgcatacttaaattatgcattgctaaattatgcatgtataaattatgcatggcgcgccatgcttcatcagactct

SEQ ID NO: 11087 - DNA, 188 bp, Artificial Sequence; identical to SEQ ID NO: 11086
  Synthetic polynucleotide

SEQ ID NO: 11088 - DNA, 191 bp, Artificial Sequence
  Synthetic polynucleotide
atcatctcaccttgcctcctgtataccaggcctatttccctgcagggtctgaaacaacatttcagagtctgaaacaacatttctcggtctgaaacaacatttcgacgtctgaaacaacatttcctagtctgaaacaacatttcactgtctgaaacaacatttctgcggcgcgccatgcttcatcagactct

SEQ ID NO: 11089 - DNA, 191 bp, Artificial Sequence; identical to SEQ ID NO: 11088
  Synthetic polynucleotide

SEQ ID NO: 11090 - DNA, 180 bp, Artificial Sequence
  Synthetic polynucleotide
atcatctcaccttgcctcctgagaagcatggatacgtccctgcagggcgggaagtggagagcgggaagtggtcggcgggaagtgggacgcgggaagtggctagcgggaagtggactgcgggaagtggtgcgcgggaagtgggtagcgggaagtggggcgcgccatgcttcatcagactct

SEQ ID NO: 11091 - DNA, 180 bp, Artificial Sequence; identical to SEQ ID NO: 11090
  Synthetic polynucleotide

SEQ ID NO: 11092 - DNA, 197 bp, Artificial Sequence
  Synthetic polynucleotide
atcatctcaccttgcctcctgtcccttgtgacatgatgcctgcaggaagaacagaatgttcagaaagaacagaatgttctcgaagaacagaatgttcgacaagaacagaatgttcctaaagaacagaatgttcactaagaacagaatgttctgcaagaacagaatgttcgtaggcgcgccatgcttcatcagactct

SEQ ID NO: 11093 - DNA, 197 bp, Artificial Sequence; identical to SEQ ID NO: 11092
  Synthetic polynucleotide

SEQ ID NO: 11094 - DNA, 156 bp, Artificial Sequence
  Synthetic polynucleotide
atcatctcaccttgcctcctgttaagcagaagatctgccctgcaggtcattaaaagatcattaaatcgtcattaaagactcattaaactatcattaaaacttcattaaatgctcattaaagtatcattaaaggcgcgccatgcttcatcagactct

SEQ ID NO: 11095 - DNA, 156 bp, Artificial Sequence; identical to SEQ ID NO: 11094
  Synthetic polynucleotide

SEQ ID NO: 11096 - DNA, 180 bp, Artificial Sequence
  Synthetic polynucleotide
atcatctcaccttgcctcctgtattccaattgtctgcccctgcaggactgagtcaccagaactgagtcacctcgactgagtcaccgacactgagtcaccctaactgagtcaccactactgagtcacctgcactgagtcaccgtaactgagtcaccggcgcgccatgcttcatcagactct

SEQ ID NO: 11097 - DNA, 180 bp, Artificial Sequence; identical to SEQ ID NO: 11096
  Synthetic polynucleotide

SEQ ID NO: 11098 - DNA, 200 bp, Artificial Sequence
  Synthetic polynucleotide
atcatctcaccttgcctcctgtgcaggtcgacgtgttacctgcagggcatgtgacaccgccgtggagagcatgtgacaccgccgtggtcggcatgtgacaccgccgtgggacgcatgtgacaccgccgtggctagcatgtgacaccgccgtggactgcatgtgacaccgccgtggggcgcgccatgcttcatcagactct

SEQ ID NO: 11099 - DNA, 200 bp, Artificial Sequence; identical to SEQ ID NO: 11098
  Synthetic polynucleotide

SEQ ID NO: 11100 - DNA, 148 bp, Artificial Sequence
  Synthetic polynucleotide
atcatctcaccttgcctcctgcttgaagtcacccggaacctgcaggctttgtcagactttgtctcgctttgtcgacctttgtcctactttgtcactctttgtctgcctttgtcgtactttgtcggcgcgccatgcttcatcagactct

SEQ ID NO: 11101 - DNA, 148 bp, Artificial Sequence; identical to SEQ ID NO: 11100
  Synthetic polynucleotide

SEQ ID NO: 11102 - DNA, 180 bp, Artificial Sequence
  Synthetic polynucleotide
atcatctcaccttgcctcctgtgagacgaggcaactcacctgcagggtcgcccccacagagtcgcccccactcggtcgcccccacgacgtcgcccccacctagtcgcccccacactgtcgcccccactgcgtcgcccccacgtagtcgcccccacggcgcgccatgcttcatcagactct

SEQ ID NO: 11103 - DNA, 180 bp, Artificial Sequence; identical to SEQ ID NO: 11102
  Synthetic polynucleotide

SEQ ID NO: 11104 - DNA, 148 bp, Artificial Sequence
  Synthetic polynucleotide
atcatctcaccttgcctcctgatttacgaggcagttcccctgcaggttatctgagattatctgtcgttatctggacttatctgctattatctgactttatctgtgcttatctggtattatctgggcgcgccatgcttcatcagactct

SEQ ID NO: 11105 - DNA, 148 bp, Artificial Sequence; identical to SEQ ID NO: 11104
  Synthetic polynucleotide

SEQ ID NO: 11106 - DNA, 197 bp, Artificial Sequence
  Synthetic polynucleotide
atcatctcaccttgcctcctgacggttgtgtctcctcgcctgcagggagaattcatactggagagagaattcatactggtcggagaattcatactgggacgagaattcatactggctagagaattcatactggactgagaattcatactggtgcgagaattcatactgggtaggcgcgccatgcttcatcagactct

SEQ ID NO: 11107 - DNA, 197 bp, Artificial Sequence; identical to SEQ ID NO: 11106
  Synthetic polynucleotide

SEQ ID NO: 11108 - DNA, 156 bp, Artificial Sequence
  Synthetic polynucleotide
atcatctcaccttgcctcctgagctgtaccagactcgccctgcaggattaattaagaattaattatcgattaattagacattaattactaattaattaactattaattatgcattaattagtaattaattaggcgcgccatgcttcatcagactct

SEQ ID NO: 11109 - DNA, 156 bp, Artificial Sequence; identical to SEQ ID NO: 11108
  Synthetic polynucleotide

SEQ ID NO: 11110 - DNA, 191 bp, Artificial Sequence
  Synthetic polynucleotide
atcatctcaccttgcctcctgataaggctggcggtcgtcctgcaggtccatcccataatactcagatccatcccataatactctcgtccatcccataatactcgactccatcccataatactcctatccatcccataatactcacttccatcccataatactctgcggcgcgccatgcttcatcagactct

SEQ ID NO: 11111 - DNA, 191 bp, Artificial Sequence; identical to SEQ ID NO: 11110
  Synthetic polynucleotide

SEQ ID NO: 11112 - DNA, 156 bp, Artificial Sequence
  Synthetic polynucleotide
atcatctcaccttgcctcctggtagatcgagctttggccctgcaggtggtaccaagatggtaccatcgtggtaccagactggtaccactatggtaccaacttggtaccatgctggtaccagtatggtaccaggcgcgccatgcttcatcagactct

SEQ ID NO: 11113 - DNA, 156 bp, Artificial Sequence; identical to SEQ ID NO: 11112
  Synthetic polynucleotide

SEQ ID NO: 11114 - DNA, 197 bp, Artificial Sequence
  Synthetic polynucleotide
atcatctcaccttgcctcctgtgcgtcagtaacggtatcctgcaggttgccttatatgggcatgagattgccttatatgggcatgtcgttgccttatatgggcatggacttgccttatatgggcatgctattgccttatatgggcatgactttgccttatatgggcatgtgcggcgcgccatgcttcatcagactct

SEQ ID NO: 11115 - DNA, 197 bp, Artificial Sequence; identical to SEQ ID NO: 11114
  Synthetic polynucleotide

SEQ ID NO: 11116 - DNA, 197 bp, Artificial Sequence
  Synthetic polynucleotide
atcatctcaccttgcctcctgcccacgagtcgatctgtcctgcaggtatagtaacagtcacagatatagtaacagtcactcgtatagtaacagtcacgactatagtaacagtcacctatatagtaacagtcacacttatagtaacagtcactgctatagtaacagtcacgtaggcgcgccatgcttcatcagactct

SEQ ID NO: 11117 - DNA, 197 bp, Artificial Sequence; identical to SEQ ID NO: 11116
  Synthetic polynucleotide

SEQ ID NO: 11118 - DNA, 172 bp, Artificial Sequence
  Synthetic polynucleotide
atcatctcaccttgcctcctggcgaatatggcccatgccctgcaggacgcgtgacgagaacgcgtgacgtcgacgcgtgacggacacgcgtgacgctaacgcgtgacgactacgcgtgacgtgcacgcgtgacggtaacgcgtgacgggcgcgccatgcttcatcagactct

SEQ ID NO: 11119 - DNA, 172 bp, Artificial Sequence; identical to SEQ ID NO: 11118
  Synthetic polynucleotide

SEQ ID NO: 11120 - DNA, 172 bp, Artificial Sequence
  Synthetic polynucleotide
atcatctcaccttgcctcctgatcgtgaagcaaggtaacctgcaggaacatatggcagaaacatatggctcgaacatatggcgacaacatatggcctaaacatatggcactaacatatggctgcaacatatggcgtaaacatatggcggcgcgccatgcttcatcagactct

SEQ ID NO: 11121 - DNA, 172 bp, Artificial Sequence; identical to SEQ ID NO: 11120
  Synthetic polynucleotide

SEQ ID NO: 11122 - DNA, 190 bp, Artificial Sequence
  Synthetic polynucleotide
atcatctcaccttgcctcctgccttgaccgtcgttagccctgcaggtgaatgtgcagtcaagatgaatgtgcagtcatcgtgaatgtgcagtcagactgaatgtgcagtcactatgaatgtgcagtcaacttgaatgtgcagtcatgctgaatgtgcagtcagtaggcgcgccatgcttcatcagactct

SEQ ID NO: 11123 - DNA, 190 bp, Artificial Sequence; identical to SEQ ID NO: 11122
  Synthetic polynucleotide

SEQ ID NO: 11124 - DNA, 172 bp, Artificial Sequence
  Synthetic polynucleotide
atcatctcaccttgcctcctggtgatattcgtgcatgacctgcagggaattgtagtagagaattgtagttcggaattgtagtgacgaattgtagtctagaattgtagtactgaattgtagttgcgaattgtagtgtagaattgtagtggcgcgccatgcttcatcagactct

SEQ ID NO: 11125 - DNA, 172 bp, Artificial Sequence; identical to SEQ ID NO: 11124
  Synthetic polynucleotide

SEQ ID NO: 11126 - DNA, 172 bp, Artificial Sequence
  Synthetic polynucleotide
atcatctcaccttgcctcctggaattcggagaaggtttcctgcaggctcattggctagactcattggcttcgctcattggctgacctcattggctctactcattggctactctcattggcttgcctcattggctgtactcattggctggcgcgccatgcttcatcagactct

SEQ ID NO: 11127 - DNA, 172 bp, Artificial Sequence; identical to SEQ ID NO: 11126
  Synthetic polynucleotide

SEQ ID NO: 11128 - DNA, 191 bp, Artificial Sequence
  Synthetic polynucleotide
atcatctcaccttgcctcctgaccaagcgctcattgcccctgcaggcacgtgctaaccacgtgagacacgtgctaaccacgtgtcgcacgtgctaaccacgtggaccacgtgctaaccacgtgctacacgtgctaaccacgtgactcacgtgctaaccacgtgtgcggcgcgccatgcttcatcagactct

SEQ ID NO: 11129 - DNA, 191 bp, Artificial Sequence; identical to SEQ ID NO: 11128
  Synthetic polynucleotide

SEQ ID NO: 11130 - DNA, 172 bp, Artificial Sequence
  Synthetic polynucleotide
atcatctcaccttgcctcctgaggaagcacatcacacacctgcaggggggatttccagaggggatttcctcgggggatttccgacggggatttccctaggggatttccactggggatttcctgcggggatttccgtaggggatttccggcgcgccatgcttcatcagactct

SEQ ID NO: 11131 - DNA, 172 bp, Artificial Sequence; identical to SEQ ID NO: 11130
  Synthetic polynucleotide

SEQ ID NO: 11132 - DNA, 172 bp, Artificial Sequence
  Synthetic polynucleotide
atcatctcaccttgcctcctgaatgcttctggttggtccctgcaggggtgagtcatagaggtgagtcattcgggtgagtcatgacggtgagtcatctaggtgagtcatactggtgagtcattgcggtgagtcatgtaggtgagtcatggcgcgccatgcttcatcagactct

SEQ ID NO: 11133 - DNA, 172 bp, Artificial Sequence; identical to SEQ ID NO: 11132
  Synthetic polynucleotide

SEQ ID NO: 11134 - DNA, 196 bp, Artificial Sequence
  Synthetic polynucleotide
atcatctcaccttgcctcctgagaggagaccaccactccctgcaggatcagataaggggagaatcagataaggggtcgatcagataagggggacatcagataaggggctaatcagataaggggactatcagataaggggtgcatcagataagggggtaatcagataaggggggcgcgccatgcttcatcagactct

SEQ ID NO: 11135 - DNA, 196 bp, Artificial Sequence; identical to SEQ ID NO: 11134
  Synthetic polynucleotide

SEQ ID NO: 11136 - DNA, 185 bp, Artificial Sequence
  Synthetic polynucleotide
atcatctcaccttgcctcctgaagtgccagactcacaacctgcaggcaagtgggggggggggagacaagtgggggggggggtcgcaagtggggggggggggaccaagtgggggggggggctacaagtgggggggggggactcaagtgggggggggggtgcggcgcgccatgcttcatcagactct

SEQ ID NO: 11137 - DNA, 185 bp, Artificial Sequence; identical to SEQ ID NO: 11136
  Synthetic polynucleotide

SEQ ID NO: 11138 - DNA, 191 bp, Artificial Sequence
  Synthetic polynucleotide
atcatctcaccttgcctcctgatagacgaatggccagccctgcaggtgataggtgtcatttatagatgataggtgtcatttattcgtgataggtgtcatttatgactgataggtgtcatttatctatgataggtgtcatttatacttgataggtgtcatttattgcggcgcgccatgcttcatcagactct

SEQ ID NO: 11139 - DNA, 191 bp, Artificial Sequence; identical to SEQ ID NO: 11138
  Synthetic polynucleotide

SEQ ID NO: 11140 - DNA, 148 bp, Artificial Sequence
  Synthetic polynucleotide
atcatctcaccttgcctcctggttattaaaccgtggttcctgcaggcccggagagacccggagtcgcccggaggaccccggagctacccggagactcccggagtgccccggaggtacccggagggcgcgccatgcttcatcagactct

SEQ ID NO: 11141 - DNA, 148 bp, Artificial Sequence; identical to SEQ ID NO: 11140
  Synthetic polynucleotide

SEQ ID NO: 11142 - DNA, 180 bp, Artificial Sequence
  Synthetic polynucleotide
atcatctcaccttgcctcctgggatgaatcagcggatccctgcaggtacttccgggtagatacttccgggttcgtacttccgggtgactacttccgggtctatacttccgggtacttacttccgggttgctacttccgggtgtatacttccgggtggcgcgccatgcttcatcagactct

SEQ ID NO: 11143 - DNA, 180 bp, Artificial Sequence; identical to SEQ ID NO: 11142
  Synthetic polynucleotide

SEQ ID NO: 11144 - DNA, 185 bp, Artificial Sequence
  Synthetic polynucleotide
atcatctcaccttgcctcctgagaagtggaacgaatcccctgcaggctattttacgactttaagactattttacgactttatcgctattttacgactttagacctattttacgactttactactattttacgactttaactctattttacgactttatgcggcgcgccatgcttcatcagactct

SEQ ID NO: 11145 - DNA, 185 bp, Artificial Sequence; identical to SEQ ID NO: 11144
  Synthetic polynucleotide

SEQ ID NO: 11146 - DNA, 180 bp, Artificial Sequence
  Synthetic polynucleotide
atcatctcaccttgcctcctgtgccgtttcacgtatcccctgcaggagtaccgttatagaagtaccgttattcgagtaccgttatgacagtaccgttatctaagtaccgttatactagtaccgttattgcagtaccgttatgtaagtaccgttatggcgcgccatgcttcatcagactct

SEQ ID NO: 11147 - DNA, 180 bp, Artificial Sequence; identical to SEQ ID NO: 11146
  Synthetic polynucleotide

SEQ ID NO: 11148 - DNA, 196 bp, Artificial Sequence
  Synthetic polynucleotide
atcatctcaccttgcctcctgcatgggagttaaagggccctgcaggaggggacgcagctgcgccccctagaaggggacgcagctgcgcccccttcgaggggacgcagctgcgccccctgacaggggacgcagctgcgccccctctaaggggacgcagctgcgccccctactggcgcgccatgcttcatcagactct

SEQ ID NO: 11149 - DNA, 196 bp, Artificial Sequence; identical to SEQ ID NO: 11148
  Synthetic polynucleotide

SEQ ID NO: 11150 - DNA, 148 bp, Artificial Sequence
  Synthetic polynucleotide
atcatctcaccttgcctcctgggtcaagtacgcctcttcctgcagggcgggggagagcgggggtcggcggggggacgcgggggctagcgggggactgcgggggtgcgcggggggtagcgggggggcgcgccatgcttcatcagactct

SEQ ID NO: 11151 - DNA, 148 bp, Artificial Sequence; identical to SEQ ID NO: 11150
  Synthetic polynucleotide

SEQ ID NO: 11152 - DNA, 185 bp, Artificial Sequence
  Synthetic polynucleotide
atcatctcaccttgcctcctgggcgggacagttctgaacctgcaggttggcgcgaaacgggcagattggcgcgaaacgggctcgttggcgcgaaacgggcgacttggcgcgaaacgggcctattggcgcgaaacgggcactttggcgcgaaacgggctgcggcgcgccatgcttcatcagactct

SEQ ID NO: 11153 - DNA, 185 bp, Artificial Sequence; identical to SEQ ID NO: 11152
  Synthetic polynucleotide

SEQ ID NO: 11154 - DNA, 197 bp, Artificial Sequence
  Synthetic polynucleotide
atcatctcaccttgcctcctgaagaacaacaattggtccctgcaggaaactacatttcccaagaaaactacatttcccatcgaaactacatttcccagacaaactacatttcccactaaaactacatttcccaactaaactacatttcccatgcaaactacatttcccagtaggcgcgccatgcttcatcagactct

SEQ ID NO: 11155 - DNA, 197 bp, Artificial Sequence; identical to SEQ ID NO: 11154
  Synthetic polynucleotide

SEQ ID NO: 11156 - DNA, 188 bp, Artificial Sequence
  Synthetic polynucleotide
atcatctcaccttgcctcctggcgtgatggcatgtgcacctgcaggccttacgtcaccagaccttacgtcacctcgccttacgtcaccgacccttacgtcaccctaccttacgtcaccactccttacgtcacctgcccttacgtcaccgtaccttacgtcaccggcgcgccatgcttcatcagactct

SEQ ID NO: 11157 - DNA, 188 bp, Artificial Sequence; identical to SEQ ID NO: 11156
  Synthetic polynucleotide

SEQ ID NO: 11158 - DNA, 196 bp, Artificial Sequence
  Synthetic polynucleotide
atcatctcaccttgcctcctgatcttcccagccgtgaccctgcaggtgcatcaatcattagatgcatcaatcatttcgtgcatcaatcattgactgcatcaatcattctatgcatcaatcattacttgcatcaatcatttgctgcatcaatcattgtatgcatcaatcattggcgcgccatgcttcatcagactct

SEQ ID NO: 11159 - DNA, 196 bp, Artificial Sequence; identical to SEQ ID NO: 11158
  Synthetic polynucleotide

SEQ ID NO: 11160 - DNA, 191 bp, Artificial Sequence
  Synthetic polynucleotide
atcatctcaccttgcctcctgtgtaaagcgtaacaatccctgcaggaatcgctaattagcgctagaaatcgctaattagcgcttcgaatcgctaattagcgctgacaatcgctaattagcgctctaaatcgctaattagcgctactaatcgctaattagcgcttgcggcgcgccatgcttcatcagactct

SEQ ID NO: 11161 - DNA, 191 bp, Artificial Sequence; identical to SEQ ID NO: 11160
  Synthetic polynucleotide

SEQ ID NO: 11162 - DNA, 191 bp, Artificial Sequence
  Synthetic polynucleotide
atcatctcaccttgcctcctggagggtgaacaactatacctgcaggccggttcaaaccggttctggcagaccggttcaaaccggttctggctcgccggttcaaaccggttctggcgacccggttcaaaccggttctggcctaccggttcaaaccggttctggcactggcgcgccatgcttcatcagactct

SEQ ID NO: 11163 - DNA, 191 bp, Artificial Sequence; identical to SEQ ID NO: 11162
  Synthetic polynucleotide

SEQ ID NO: 11164 - DNA, 188 bp, Artificial Sequence
  Synthetic polynucleotide
atcatctcaccttgcctcctgattgcatacatccgcaccctgcaggctcccctgccgcagactcccctgccgctcgctcccctgccgcgacctcccctgccgcctactcccctgccgcactctcccctgccgctgcctcccctgccgcgtactcccctgccgcggcgcgccatgcttcatcagactct

SEQ ID NO: 11165 - DNA, 188 bp, Artificial Sequence; identical to SEQ ID NO: 11164
  Synthetic polynucleotide

SEQ ID NO: 11166 - DNA, 172 bp, Artificial Sequence
  Synthetic polynucleotide
atcatctcaccttgcctcctgacctgggctcactctaccctgcaggggtgagtcacagaggtgagtcactcgggtgagtcacgacggtgagtcacctaggtgagtcacactggtgagtcactgcggtgagtcacgtaggtgagtcacggcgcgccatgcttcatcagactct

SEQ ID NO: 11167 - DNA, 172 bp, Artificial Sequence; identical to SEQ ID NO: 11166
  Synthetic polynucleotide

SEQ ID NO: 11168 - DNA, 191 bp, Artificial Sequence
  Synthetic polynucleotide
atcatctcaccttgcctcctgatccggccgagctatgacctgcaggtgcagtcatgcgtgacgagatgcagtcatgcgtgacgtcgtgcagtcatgcgtgacggactgcagtcatgcgtgacgctatgcagtcatgcgtgacgacttgcagtcatgcgtgacgtgcggcgcgccatgcttcatcagactct

SEQ ID NO: 11169 - DNA, 191 bp, Artificial Sequence; identical to SEQ ID NO: 11168
  Synthetic polynucleotide

SEQ ID NO: 11170 - DNA, 185 bp, Artificial Sequence
  Synthetic polynucleotide
atcatctcaccttgcctcctgagcctcggttggtgatacctgcagggggtcaacgagttcacagagggtcaacgagttcactcggggtcaacgagttcacgacgggtcaacgagttcacctagggtcaacgagttcacactgggtcaacgagttcactgcggcgcgccatgcttcatcagactct

SEQ ID NO: 11171 - DNA, 185 bp, Artificial Sequence; identical to SEQ ID NO: 11170
  Synthetic polynucleotide

SEQ ID NO: 11172 - DNA, 185 bp, Artificial Sequence
  Synthetic polynucleotide
atcatctcaccttgcctcctgcgacaactagcatcaagcctgcaggcaaattgatacattgtagacaaattgatacattgttcgcaaattgatacattgtgaccaaattgatacattgtctacaaattgatacattgtactcaaattgatacattgttgcggcgcgccatgcttcatcagactct

SEQ ID NO: 11173 - DNA, 185 bp, Artificial Sequence; identical to SEQ ID NO: 11172
  Synthetic polynucleotide

SEQ ID NO: 11174 - DNA, 197 bp, Artificial Sequence
  Synthetic polynucleotide
atcatctcaccttgcctcctgcgcctatattcctgaatcctgcaggaccgttgctatggtaagaaccgttgctatggtatcgaccgttgctatggtagacaccgttgctatggtactaaccgttgctatggtaactaccgttgctatggtatgcaccgttgctatggtagtaggcgcgccatgcttcatcagactct

SEQ ID NO: 11175 - DNA, 197 bp, Artificial Sequence; identical to SEQ ID NO: 11174
  Synthetic polynucleotide

SEQ ID NO: 11176 - DNA, 196 bp, Artificial Sequence
  Synthetic polynucleotide
atcatctcaccttgcctcctgggcagccattcctagttcctgcagggtgcaacaggtggagagtgcaacaggtggtcggtgcaacaggtgggacgtgcaacaggtggctagtgcaacaggtggactgtgcaacaggtggtgcgtgcaacaggtgggtagtgcaacaggtggggcgcgccatgcttcatcagactct

SEQ ID NO: 11177 - DNA, 196 bp, Artificial Sequence; identical to SEQ ID NO: 11176
  Synthetic polynucleotide

SEQ ID NO: 11178 - DNA, 172 bp, Artificial Sequence
  Synthetic polynucleotide
atcatctcaccttgcctcctgatactccagatacgccacctgcagggatcacgtggagagatcacgtggtcggatcacgtgggacgatcacgtggctagatcacgtggactgatcacgtggtgcgatcacgtgggtagatcacgtggggcgcgccatgcttcatcagactct

SEQ ID NO: 11179 - DNA, 172 bp, Artificial Sequence; identical to SEQ ID NO: 11178
  Synthetic polynucleotide

SEQ ID NO: 11180 - DNA, 172 bp, Artificial Sequence
  Synthetic polynucleotide
atcatctcaccttgcctcctgtgcatggtcatggacaccctgcaggagatcaaaggagaagatcaaaggtcgagatcaaagggacagatcaaaggctaagatcaaaggactagatcaaaggtgcagatcaaagggtaagatcaaaggggcgcgccatgcttcatcagactct

SEQ ID NO: 11181 - DNA, 172 bp, Artificial Sequence; identical to SEQ ID NO: 11180
  Synthetic polynucleotide

SEQ ID NO: 11182 - DNA, 164 bp, Artificial Sequence
  Synthetic polynucleotide
atcatctcaccttgcctcctgtcatcaaaccgtgttgtcctgcaggtcttaattaagatcttaattatcgtcttaattagactcttaattactatcttaattaacttcttaattatgctcttaattagtatcttaattaggcgcgccatgcttcatcagactct

SEQ ID NO: 11183 - DNA, 164 bp, Artificial Sequence; identical to SEQ ID NO: 11182
  Synthetic polynucleotide

SEQ ID NO: 11184 - DNA, 190 bp, Artificial Sequence
  Synthetic polynucleotide
atcatctcaccttgcctcctgtctcgaggacagacccacctgcaggtcgaggctagaccaagatcgaggctagaccatcgtcgaggctagaccagactcgaggctagaccactatcgaggctagaccaacttcgaggctagaccatgctcgaggctagaccagtaggcgcgccatgcttcatcagactct

SEQ ID NO: 11185 - DNA, 190 bp, Artificial Sequence; identical to SEQ ID NO: 11184
  Synthetic polynucleotide

SEQ ID NO: 11186 - DNA, 188 bp, Artificial Sequence
  Synthetic polynucleotide
atcatctcaccttgcctcctggtatgctaacgcgacaccctgcaggcttaattgctttagacttaattgcttttcgcttaattgctttgaccttaattgctttctacttaattgctttactcttaattgcttttgccttaattgctttgtacttaattgctttggcgcgccatgcttcatcagactct

SEQ ID NO: 11187 - DNA, 188 bp, Artificial Sequence; identical to SEQ ID NO: 11186
  Synthetic polynucleotide

SEQ ID NO: 11188 - DNA, 172 bp, Artificial Sequence
  Synthetic polynucleotide
atcatctcaccttgcctcctggtacgtggaacagagcacctgcaggattccagacaagaattccagacatcgattccagacagacattccagacactaattccagacaactattccagacatgcattccagacagtaattccagacaggcgcgccatgcttcatcagactct

SEQ ID NO: 11189 - DNA, 172 bp, Artificial Sequence; identical to SEQ ID NO: 11188
  Synthetic polynucleotide

SEQ ID NO: 11190 - DNA, 180 bp, Artificial Sequence
  Synthetic polynucleotide
atcatctcaccttgcctcctgtgtcagttgaagcggatcctgcaggggatcacgtggagaggatcacgtggtcgggatcacgtgggacggatcacgtggctaggatcacgtggactggatcacgtggtgcggatcacgtgggtaggatcacgtggggcgcgccatgcttcatcagactct

SEQ ID NO: 11191 - DNA, 180 bp, Artificial Sequence; identical to SEQ ID NO: 11190
  Synthetic polynucleotide

SEQ ID NO: 11192 - DNA, 191 bp, Artificial Sequence
  Synthetic polynucleotide
atcatctcaccttgcctcctgagtaagcttgactccatcctgcaggcaagttaattaataatcagacaagttaattaataatctcgcaagttaattaataatcgaccaagttaattaataatcctacaagttaattaataatcactcaagttaattaataatctgcggcgcgccatgcttcatcagactct

SEQ ID NO: 11193 - DNA, 191 bp, Artificial Sequence; identical to SEQ ID NO: 11192
  Synthetic polynucleotide

SEQ ID NO: 11194 - DNA, 172 bp, Artificial Sequence
  Synthetic polynucleotide
atcatctcaccttgcctcctgccatgcattcgcgttctcctgcaggggggggcgggagaggggggcgggtcgggggggcggggacggggggcgggctaggggggcgggactggggggcgggtgcggggggcggggtaggggggcgggggcgcgccatgcttcatcagactct

SEQ ID NO: 11195 - DNA, 172 bp, Artificial Sequence; identical to SEQ ID NO: 11194
  Synthetic polynucleotide

SEQ ID NO: 11196 - DNA, 180 bp, Artificial Sequence
  Synthetic polynucleotide
atcatctcaccttgcctcctgggaactgtgacccttcccctgcaggtgtgactcattagatgtgactcatttcgtgtgactcattgactgtgactcattctatgtgactcattacttgtgactcatttgctgtgactcattgtatgtgactcattggcgcgccatgcttcatcagactct

SEQ ID NO: 11197 - DNA, 180 bp, Artificial Sequence; identical to SEQ ID NO: 11196
  Synthetic polynucleotide

SEQ ID NO: 11198 - DNA, 156 bp, Artificial Sequence
  Synthetic polynucleotide
atcatctcaccttgcctcctgattccaacactcgctttcctgcaggctacgtttagactacgttttcgctacgtttgacctacgtttctactacgtttactctacgttttgcctacgtttgtactacgtttggcgcgccatgcttcatcagactct

SEQ ID NO: 11199 - DNA, 156 bp, Artificial Sequence; identical to SEQ ID NO: 11198
  Synthetic polynucleotide

SEQ ID NO: 11200 - DNA, 172 bp, Artificial Sequence
  Synthetic polynucleotide
atcatctcaccttgcctcctgacagcatccgatgcttgcctgcaggtcaagtgggaagatcaagtgggatcgtcaagtgggagactcaagtgggactatcaagtgggaacttcaagtgggatgctcaagtgggagtatcaagtgggaggcgcgccatgcttcatcagactct

SEQ ID NO: 11201 - DNA, 172 bp, Artificial Sequence; identical to SEQ ID NO: 11200
  Synthetic polynucleotide

SEQ ID NO: 11202 - DNA, 197 bp, Artificial Sequence
  Synthetic polynucleotide
atcatctcaccttgcctcctggcgacttactccacgttcctgcagggaaagtgaaactgaaagagaaagtgaaactgaatcggaaagtgaaactgaagacgaaagtgaaactgaactagaaagtgaaactgaaactgaaagtgaaactgaatgcgaaagtgaaactgaagtaggcgcgccatgcttcatcagactct

SEQ ID NO: 11203 - DNA, 197 bp, Artificial Sequence; identical to SEQ ID NO: 11202
  Synthetic polynucleotide

SEQ ID NO: 11204 - DNA, 148 bp, Artificial Sequence
  Synthetic polynucleotide
atcatctcaccttgcctcctgggtccacatcttgcgatcctgcaggtggggtgagatggggtgtcgtggggtggactggggtgctatggggtgacttggggtgtgctggggtggtatggggtgggcgcgccatgcttcatcagactct

SEQ ID NO: 11205 - DNA, 148 bp, Artificial Sequence; identical to SEQ ID NO: 11204
  Synthetic polynucleotide

SEQ ID NO: 11206 - DNA, 164 bp, Artificial Sequence
  Synthetic polynucleotide
atcatctcaccttgcctcctgcaggaatactcaggctgcctgcaggaggatgaatagaaggatgaattcgaggatgaatgacaggatgaatctaaggatgaatactaggatgaattgcaggatgaatgtaaggatgaatggcgcgccatgcttcatcagactct

SEQ ID NO: 11207 - DNA, 164 bp, Artificial Sequence; identical to SEQ ID NO: 11206
  Synthetic polynucleotide

SEQ ID NO: 11208 - DNA, 197 bp, Artificial Sequence
  Synthetic polynucleotide
atcatctcaccttgcctcctgcgtaaggcacaaattaccctgcaggcaagatggcggccccagacaagatggcggcccctcgcaagatggcggccccgaccaagatggcggccccctacaagatggcggccccactcaagatggcggcccctgccaagatggcggccccgtaggcgcgccatgcttcatcagactct

SEQ ID NO: 11209 - DNA, 197 bp, Artificial Sequence; identical to SEQ ID NO: 11208
  Synthetic polynucleotide

SEQ ID NO: 11210 - DNA, 140 bp, Artificial Sequence
  Synthetic polynucleotide
atcatctcaccttgcctcctgaatctggatcagtacaacctgcaggcatgacagacatgactcgcatgacgaccatgacctacatgacactcatgactgccatgacgtacatgacggcgcgccatgcttcatcagactct

SEQ ID NO: 11211 - DNA, 140 bp, Artificial Sequence; identical to SEQ ID NO: 11210
  Synthetic polynucleotide

SEQ ID NO: 11212 - DNA, 191 bp, Artificial Sequence
  Synthetic polynucleotide
atcatctcaccttgcctcctgcggatgtaaactcaacacctgcagggatgaatggtattcatgagagatgaatggtattcatgtcggatgaatggtattcatggacgatgaatggtattcatgctagatgaatggtattcatgactgatgaatggtattcatgtgcggcgcgccatgcttcatcagactct

SEQ ID NO: 11213 - DNA, 191 bp, Artificial Sequence; identical to SEQ ID NO: 11212
  Synthetic polynucleotide

SEQ ID NO: 11214 - DNA, 200 bp, Artificial Sequence
  Synthetic polynucleotide
atcatctcaccttgcctcctggcctatgacactgaggtcctgcaggactacaactcccagcaggcagaactacaactcccagcaggctcgactacaactcccagcaggcgacactacaactcccagcaggcctaactacaactcccagcaggcactactacaactcccagcaggcggcgcgccatgcttcatcagactct

SEQ ID NO: 11215 - DNA, 200 bp, Artificial Sequence; identical to SEQ ID NO: 11214
  Synthetic polynucleotide

SEQ ID NO: 11216 - DNA, 164 bp, Artificial Sequence
  Synthetic polynucleotide
atcatctcaccttgcctcctgttcataccagacaattgcctgcaggactcattgaagaactcattgatcgactcattgagacactcattgactaactcattgaactactcattgatgcactcattgagtaactcattgaggcgcgccatgcttcatcagactct

SEQ ID NO: 11217 - DNA, 164 bp, Artificial Sequence; identical to SEQ ID NO: 11216
  Synthetic polynucleotide

SEQ ID NO: 11218 - DNA, 172 bp, Artificial Sequence
  Synthetic polynucleotide
atcatctcaccttgcctcctgctctccatcaaactagacctgcagggtcacgcttgagagtcacgcttgtcggtcacgcttggacgtcacgcttgctagtcacgcttgactgtcacgcttgtgcgtcacgcttggtagtcacgcttgggcgcgccatgcttcatcagactct

SEQ ID NO: 11219 - DNA, 172 bp, Artificial Sequence; identical to SEQ ID NO: 11218
  Synthetic polynucleotide

SEQ ID NO: 11220 - DNA, 156 bp, Artificial Sequence
  Synthetic polynucleotide
atcatctcaccttgcctcctggcactgtgaatgcattgcctgcaggtatcaattagatatcaatttcgtatcaattgactatcaattctatatcaattacttatcaatttgctatcaattgtatatcaattggcgcgccatgcttcatcagactct

SEQ ID NO: 11221 - DNA, 156 bp, Artificial Sequence; identical to SEQ ID NO: 11220
  Synthetic polynucleotide

SEQ ID NO: 11222 - DNA, 191 bp, Artificial Sequence
  Synthetic polynucleotide
atcatctcaccttgcctcctgcaagccgggttgatgtccctgcaggtaaactaattagtgaacagataaactaattagtgaactcgtaaactaattagtgaacgactaaactaattagtgaacctataaactaattagtgaacacttaaactaattagtgaactgcggcgcgccatgcttcatcagactct

SEQ ID NO: 11223 - DNA, 191 bp, Artificial Sequence; identical to SEQ ID NO: 11222
  Synthetic polynucleotide

SEQ ID NO: 11224 - DNA, 180 bp, Artificial Sequence
  Synthetic polynucleotide
atcatctcaccttgcctcctgatgtttcattcgcatggcctgcaggcgggcgggaggagacgggcgggaggtcgcgggcgggagggaccgggcgggaggctacgggcgggaggactcgggcgggaggtgccgggcgggagggtacgggcgggaggggcgcgccatgcttcatcagactct

SEQ ID NO: 11225 - DNA, 180 bp, Artificial Sequence; identical to SEQ ID NO: 11224
  Synthetic polynucleotide

SEQ ID NO: 11226 - DNA, 190 bp, Artificial Sequence
  Synthetic polynucleotide
atcatctcaccttgcctcctggtttaataacgaggctacctgcaggagtaaatattaactagaagtaaatattaacttcgagtaaatattaactgacagtaaatattaactctaagtaaatattaactactagtaaatattaacttgcagtaaatattaactgtaggcgcgccatgcttcatcagactct

SEQ ID NO: 11227 - DNA, 190 bp, Artificial Sequence; identical to SEQ ID NO: 11226
  Synthetic polynucleotide

SEQ ID NO: 11228 - DNA, 185 bp, Artificial Sequence
  Synthetic polynucleotide
atcatctcaccttgcctcctggcttcttaagtgcatttcctgcaggaatgccagacgccattagaaatgccagacgccatttcgaatgccagacgccattgacaatgccagacgccattctaaatgccagacgccattactaatgccagacgccatttgcggcgcgccatgcttcatcagactct

SEQ ID NO: 11229 - DNA, 185 bp, Artificial Sequence; identical to SEQ ID NO: 11228
  Synthetic polynucleotide

SEQ ID NO: 11230 - DNA, 172 bp, Artificial Sequence
  Synthetic polynucleotide
atcatctcaccttgcctcctgtatcatgctaccctagccctgcaggttttatgagcagattttatgagctcgttttatgagcgacttttatgagcctattttatgagcactttttatgagctgcttttatgagcgtattttatgagcggcgcgccatgcttcatcagactct

SEQ ID NO: 11231 - DNA, 172 bp, Artificial Sequence; identical to SEQ ID NO: 11230
  Synthetic polynucleotide

SEQ ID NO: 11232 - DNA, 191 bp, Artificial Sequence
  Synthetic polynucleotide
atcatctcaccttgcctcctgtgggaatacgtggaatacctgcagggaaatgttgtttcagacagagaaatgttgtttcagactcggaaatgttgtttcagacgacgaaatgttgtttcagacctagaaatgttgtttcagacactgaaatgttgtttcagactgcggcgcgccatgcttcatcagactct

SEQ ID NO: 11233 - DNA, 191 bp, Artificial Sequence; identical to SEQ ID NO: 11232
  Synthetic polynucleotide

SEQ ID NO: 11234 - DNA, 164 bp, Artificial Sequence
  Synthetic polynucleotide
atcatctcaccttgcctcctgatgcacttacgaatcgccctgcaggattccaggcagaattccaggctcgattccaggcgacattccaggcctaattccaggcactattccaggctgcattccaggcgtaattccaggcggcgcgccatgcttcatcagactct

SEQ ID NO: 11235 - DNA, 164 bp, Artificial Sequence; identical to SEQ ID NO: 11234
  Synthetic polynucleotide

SEQ ID NO: 11236 - DNA, 188 bp, Artificial Sequence
  Synthetic polynucleotide
atcatctcaccttgcctcctgacaagacgtacttcgagcctgcaggcagcagctgctgagacagcagctgctgtcgcagcagctgctggaccagcagctgctgctacagcagctgctgactcagcagctgctgtgccagcagctgctggtacagcagctgctgggcgcgccatgcttcatcagactct

SEQ ID NO: 11237 - DNA, 188 bp, Artificial Sequence; identical to SEQ ID NO: 11236
  Synthetic polynucleotide

SEQ ID NO: 11238 - DNA, 180 bp, Artificial Sequence
  Synthetic polynucleotide
atcatctcaccttgcctcctgaggattagatttgtacgcctgcaggcagccaatgagagacagccaatgagtcgcagccaatgaggaccagccaatgagctacagccaatgagactcagccaatgagtgccagccaatgaggtacagccaatgagggcgcgccatgcttcatcagactct

SEQ ID NO: 11239 - DNA, 180 bp, Artificial Sequence; identical to SEQ ID NO: 11238
  Synthetic polynucleotide

SEQ ID NO: 11240 - DNA, 190 bp, Artificial Sequence
  Synthetic polynucleotide
atcatctcaccttgcctcctgactgcaccattgttctacctgcaggagaaagttctagaaagaagaaagttctagaatcgagaaagttctagaagacagaaagttctagaactaagaaagttctagaaactagaaagttctagaatgcagaaagttctagaagtaggcgcgccatgcttcatcagactct

SEQ ID NO: 11241 - DNA, 190 bp, Artificial Sequence; identical to SEQ ID NO: 11240
  Synthetic polynucleotide

SEQ ID NO: 11242 - DNA, 196 bp, Artificial Sequence
  Synthetic polynucleotide
atcatctcaccttgcctcctgtggcatattgggagatgcctgcaggtatgcataaattaagatatgcataaattatcgtatgcataaattagactatgcataaattactatatgcataaattaacttatgcataaattatgctatgcataaattagtatatgcataaattaggcgcgccatgcttcatcagactct

SEQ ID NO: 11243 - DNA, 196 bp, Artificial Sequence; identical to SEQ ID NO: 11242
  Synthetic polynucleotide

SEQ ID NO: 11244 - DNA, 197 bp, Artificial Sequence
  Synthetic polynucleotide
atcatctcaccttgcctcctgcggagtatcagaggattcctgcaggcgaacccggaagtggagacgaacccggaagtggtcgcgaacccggaagtgggaccgaacccggaagtggctacgaacccggaagtggactcgaacccggaagtggtgccgaacccggaagtgggtaggcgcgccatgcttcatcagactct

SEQ ID NO: 11245 - DNA, 197 bp, Artificial Sequence; identical to SEQ ID NO: 11244
  Synthetic polynucleotide

SEQ ID NO: 11246 - DNA, 180 bp, Artificial Sequence
  Synthetic polynucleotide
atcatctcaccttgcctcctggcattaaatcgagtgggcctgcaggatgagtcacccagaatgagtcaccctcgatgagtcacccgacatgagtcacccctaatgagtcacccactatgagtcaccctgcatgagtcacccgtaatgagtcacccggcgcgccatgcttcatcagactct

SEQ ID NO: 11247 - DNA, 180 bp, Artificial Sequence; identical to SEQ ID NO: 11246
  Synthetic polynucleotide

SEQ ID NO: 11248 - DNA, 164 bp, Artificial Sequence
  Synthetic polynucleotide
atcatctcaccttgcctcctgtaggcaatgcagtcggtcctgcaggcttggcacgagacttggcacgtcgcttggcacggaccttggcacgctacttggcacgactcttggcacgtgccttggcacggtacttggcacgggcgcgccatgcttcatcagactct

SEQ ID NO: 11249 - DNA, 164 bp, Artificial Sequence; identical to SEQ ID NO: 11248
  Synthetic polynucleotide

SEQ ID NO: 11250 - DNA, 188 bp, Artificial Sequence
  Synthetic polynucleotide
atcatctcaccttgcctcctggcctccaattgttgcatcctgcaggataagaggaaatagaataagaggaaattcgataagaggaaatgacataagaggaaatctaataagaggaaatactataagaggaaattgcataagaggaaatgtaataagaggaaatggcgcgccatgcttcatcagactct

SEQ ID NO: 11251 - DNA, 188 bp, Artificial Sequence; identical to SEQ ID NO: 11250
  Synthetic polynucleotide

SEQ ID NO: 11252 - DNA, 185 bp, Artificial Sequence
  Synthetic polynucleotide
atcatctcaccttgcctcctgccagtttgtataactcacctgcagggtcaccatctgttcgaagagtcaccatctgttcgatcggtcaccatctgttcgagacgtcaccatctgttcgactagtcaccatctgttcgaactgtcaccatctgttcgatgcggcgcgccatgcttcatcagactct

SEQ ID NO: 11253 - DNA, 185 bp, Artificial Sequence; identical to SEQ ID NO: 11252
  Synthetic polynucleotide

SEQ ID NO: 11254 - DNA, 172 bp, Artificial Sequence
  Synthetic polynucleotide
atcatctcaccttgcctcctggccgacacatttcctaccctgcagggttgcgggacagagttgcgggactcggttgcgggacgacgttgcgggacctagttgcgggacactgttgcgggactgcgttgcgggacgtagttgcgggacggcgcgccatgcttcatcagactct

SEQ ID NO: 11255 - DNA, 172 bp, Artificial Sequence; identical to SEQ ID NO: 11254
  Synthetic polynucleotide

SEQ ID NO: 11256 - DNA, 180 bp, Artificial Sequence
  Synthetic polynucleotide
atcatctcaccttgcctcctgaactgtaactgcgatggcctgcaggtttccaggaaaagatttccaggaaatcgtttccaggaaagactttccaggaaactatttccaggaaaacttttccaggaaatgctttccaggaaagtatttccaggaaaggcgcgccatgcttcatcagactct

SEQ ID NO: 11257 - DNA, 180 bp, Artificial Sequence; identical to SEQ ID NO: 11256
  Synthetic polynucleotide

SEQ ID NO: 11258 - DNA, 172 bp, Artificial Sequence
  Synthetic polynucleotide
atcatctcaccttgcctcctgatctctagctccgtggccctgcagggccgccgcggagagccgccgcggtcggccgccgcgggacgccgccgcggctagccgccgcggactgccgccgcggtgcgccgccgcgggtagccgccgcggggcgcgccatgcttcatcagactct

SEQ ID NO: 11259 - DNA, 172 bp, Artificial Sequence; identical to SEQ ID NO: 11258
  Synthetic polynucleotide

SEQ ID NO: 11260 - DNA, 191 bp, Artificial Sequence
  Synthetic polynucleotide
atcatctcaccttgcctcctgttctcgtgattagcggccctgcaggatttgcataacaaaggaagaatttgcataacaaaggatcgatttgcataacaaaggagacatttgcataacaaaggactaatttgcataacaaaggaactatttgcataacaaaggatgcggcgcgccatgcttcatcagactct

SEQ ID NO: 11261 - DNA, 191 bp, Artificial Sequence; identical to SEQ ID NO: 11260
  Synthetic polynucleotide

SEQ ID NO: 11262 - DNA, 180 bp, Artificial Sequence
  Synthetic polynucleotide
atcatctcaccttgcctcctgataatggcctagcgtgacctgcaggctcctcgccccagactcctcgcccctcgctcctcgccccgacctcctcgccccctactcctcgccccactctcctcgcccctgcctcctcgccccgtactcctcgccccggcgcgccatgcttcatcagactct

SEQ ID NO: 11263 - DNA, 180 bp, Artificial Sequence; identical to SEQ ID NO: 11262
  Synthetic polynucleotide

SEQ ID NO: 11264 - DNA, 164 bp, Artificial Sequence
  Synthetic polynucleotide
atcatctcaccttgcctcctgtcccgttcaaacccggacctgcaggtatatatatagatatatatattcgtatatatatgactatatatatctatatatatatacttatatatattgctatatatatgtatatatatatggcgcgccatgcttcatcagactct

SEQ ID NO: 11265 - DNA, 164 bp, Artificial Sequence; identical to SEQ ID NO: 11264
  Synthetic polynucleotide

SEQ ID NO: 11266 - DNA, 190 bp, Artificial Sequence
  Synthetic polynucleotide
atcatctcaccttgcctcctgtcggcttctttcgggctcctgcaggcccacagcctcgtcagacccacagcctcgtctcgcccacagcctcgtcgaccccacagcctcgtcctacccacagcctcgtcactcccacagcctcgtctgccccacagcctcgtcgtaggcgcgccatgcttcatcagactct

SEQ ID NO: 11267 - DNA, 190 bp, Artificial Sequence; identical to SEQ ID NO: 11266
  Synthetic polynucleotide

SEQ ID NO: 11268 - DNA, 190 bp, Artificial Sequence
  Synthetic polynucleotide
atcatctcaccttgcctcctgcatctcacttgctgcaccctgcaggggaaagtgaaagcaagaggaaagtgaaagcatcgggaaagtgaaagcagacggaaagtgaaagcactaggaaagtgaaagcaactggaaagtgaaagcatgcggaaagtgaaagcagtaggcgcgccatgcttcatcagactct

SEQ ID NO: 11269 - DNA, 190 bp, Artificial Sequence; identical to SEQ ID NO: 11268
  Synthetic polynucleotide

SEQ ID NO: 11270 - DNA, 197 bp, Artificial Sequence
  Synthetic polynucleotide
atcatctcaccttgcctcctgtacaagccgaccctatgcctgcaggcaggtcaccgtgaccttgagacaggtcaccgtgaccttgtcgcaggtcaccgtgaccttggaccaggtcaccgtgaccttgctacaggtcaccgtgaccttgactcaggtcaccgtgaccttgtgcggcgcgccatgcttcatcagactct

SEQ ID NO: 11271 - DNA, 197 bp, Artificial Sequence; identical to SEQ ID NO: 11270
  Synthetic polynucleotide

SEQ ID NO: 11272 - DNA, 156 bp, Artificial Sequence
  Synthetic polynucleotide
atcatctcaccttgcctcctgcctcaggatctatgtagcctgcaggagctgactagaagctgacttcgagctgactgacagctgactctaagctgactactagctgacttgcagctgactgtaagctgactggcgcgccatgcttcatcagactct

SEQ ID NO: 11273 - DNA, 156 bp, Artificial Sequence; identical to SEQ ID NO: 11272
  Synthetic polynucleotide

SEQ ID NO: 11274 - DNA, 148 bp, Artificial Sequence
  Synthetic polynucleotide
atcatctcaccttgcctcctgaggagaccttctagcctcctgcaggtaagtatagataagtattcgtaagtatgactaagtatctataagtatacttaagtattgctaagtatgtataagtatggcgcgccatgcttcatcagactct

SEQ ID NO: 11275 - DNA, 148 bp, Artificial Sequence; identical to SEQ ID NO: 11274
  Synthetic polynucleotide

SEQ ID NO: 11276 - DNA, 156 bp, Artificial Sequence
  Synthetic polynucleotide
atcatctcaccttgcctcctgacttactagcataacgccctgcaggtgaccttgagatgaccttgtcgtgaccttggactgaccttgctatgaccttgacttgaccttgtgctgaccttggtatgaccttgggcgcgccatgcttcatcagactct

SEQ ID NO: 11277 - DNA, 156 bp, Artificial Sequence; identical to SEQ ID NO: 11276
  Synthetic polynucleotide

SEQ ID NO: 11278 - DNA, 164 bp, Artificial Sequence
  Synthetic polynucleotide
atcatctcaccttgcctcctgtccaggtcaacccaacccctgcagggttaattagagagttaattagtcggttaattaggacgttaattagctagttaattagactgttaattagtgcgttaattaggtagttaattagggcgcgccatgcttcatcagactct

SEQ ID NO: 11279 - DNA, 164 bp, Artificial Sequence; identical to SEQ ID NO: 11278
  Synthetic polynucleotide

SEQ ID NO: 11280 - DNA, 197 bp, Artificial Sequence
  Synthetic polynucleotide
atcatctcaccttgcctcctggacatgatcggttggcgcctgcaggaccgcaccatctgtcagaaccgcaccatctgtctcgaccgcaccatctgtcgacaccgcaccatctgtcctaaccgcaccatctgtcactaccgcaccatctgtctgcaccgcaccatctgtcgtaggcgcgccatgcttcatcagactct

SEQ ID NO: 11281 - DNA, 197 bp, Artificial Sequence; identical to SEQ ID NO: 11280
  Synthetic polynucleotide

SEQ ID NO: 11282 - DNA, 188 bp, Artificial Sequence
  Synthetic polynucleotide
atcatctcaccttgcctcctgacctttccctggtattacctgcaggatgcgtgggcggagaatgcgtgggcggtcgatgcgtgggcgggacatgcgtgggcggctaatgcgtgggcggactatgcgtgggcggtgcatgcgtgggcgggtaatgcgtgggcggggcgcgccatgcttcatcagactct

SEQ ID NO: 11283 - DNA, 188 bp, Artificial Sequence; identical to SEQ ID NO: 11282
  Synthetic polynucleotide

SEQ ID NO: 11284 - DNA, 196 bp, Artificial Sequence
  Synthetic polynucleotide
atcatctcaccttgcctcctgaggcttgctacggtggacctgcagggccttaccaaataagagccttaccaaatatcggccttaccaaatagacgccttaccaaatactagccttaccaaataactgccttaccaaatatgcgccttaccaaatagtagccttaccaaataggcgcgccatgcttcatcagactct

SEQ ID NO: 11285 - DNA, 196 bp, Artificial Sequence; identical to SEQ ID NO: 11284
  Synthetic polynucleotide

SEQ ID NO: 11286 - DNA, 197 bp, Artificial Sequence
  Synthetic polynucleotide
atcatctcaccttgcctcctgtctcacagggcatcagccctgcagggggcaaaggtcagggagagggcaaaggtcagggtcggggcaaaggtcaggggacgggcaaaggtcagggctagggcaaaggtcagggactgggcaaaggtcagggtgcgggcaaaggtcaggggtaggcgcgccatgcttcatcagactct

SEQ ID NO: 11287 - DNA, 197 bp, Artificial Sequence; identical to SEQ ID NO: 11286
  Synthetic polynucleotide

SEQ ID NO: 11288 - DNA, 172 bp, Artificial Sequence
  Synthetic polynucleotide
atcatctcaccttgcctcctgagctatcgcgtggcactcctgcaggagaggtcagtagaagaggtcagttcgagaggtcagtgacagaggtcagtctaagaggtcagtactagaggtcagttgcagaggtcagtgtaagaggtcagtggcgcgccatgcttcatcagactct

SEQ ID NO: 11289 - DNA, 172 bp, Artificial Sequence; identical to SEQ ID NO: 11288
  Synthetic polynucleotide

SEQ ID NO: 11290 - DNA, 180 bp, Artificial Sequence
  Synthetic polynucleotide
atcatctcaccttgcctcctgattgtgatttcagggtgcctgcaggccacttcctgtagaccacttcctgttcgccacttcctgtgacccacttcctgtctaccacttcctgtactccacttcctgttgcccacttcctgtgtaccacttcctgtggcgcgccatgcttcatcagactct

SEQ ID NO: 11291 - DNA, 180 bp, Artificial Sequence; identical to SEQ ID NO: 11290
  Synthetic polynucleotide

SEQ ID NO: 11292 - DNA, 186 bp, Artificial Sequence
  Synthetic polynucleotide
atcatctcaccttgcctcctgatgacagttgcaagaggcctgcaggaggtcagggtgacctgggccagaaggtcagggtgacctgggcctcgaggtcagggtgacctgggccgacaggtcagggtgacctgggccctaaggtcagggtgacctgggccactggcgcgccatgcttcatcagactct

SEQ ID NO: 11293 - DNA, 186 bp, Artificial Sequence; identical to SEQ ID NO: 11292
  Synthetic polynucleotide

SEQ ID NO: 11294 - DNA, 148 bp, Artificial Sequence
  Synthetic polynucleotide
atcatctcaccttgcctcctgcataagagagctggttgcctgcaggcagataaagacagataatcgcagataagaccagataactacagataaactcagataatgccagataagtacagataaggcgcgccatgcttcatcagactct

SEQ ID NO: 11295 - DNA, 148 bp, Artificial Sequence; identical to SEQ ID NO: 11294
  Synthetic polynucleotide

SEQ ID NO: 11296 - DNA, 197 bp, Artificial Sequence
  Synthetic polynucleotide
atcatctcaccttgcctcctgagtgtcgtgacgatcaccctgcagggttctcgcgagatttagagttctcgcgagattttcggttctcgcgagatttgacgttctcgcgagatttctagttctcgcgagatttactgttctcgcgagattttgcgttctcgcgagatttgtaggcgcgccatgcttcatcagactct

SEQ ID NO: 11297 - DNA, 197 bp, Artificial Sequence; identical to SEQ ID NO: 11296
  Synthetic polynucleotide

SEQ ID NO: 11298 - DNA, 186 bp, Artificial Sequence
  Synthetic polynucleotide
atcatctcaccttgcctcctggaatgttcctcccggtacctgcagggtaggtcacggtgacctactagagtaggtcacggtgacctacttcggtaggtcacggtgacctactgacgtaggtcacggtgacctactctagtaggtcacggtgacctactactggcgcgccatgcttcatcagactct

SEQ ID NO: 11299 - DNA, 186 bp, Artificial Sequence; identical to SEQ ID NO: 11298
  Synthetic polynucleotide

SEQ ID NO: 11300 - DNA, 179 bp, Artificial Sequence
  Synthetic polynucleotide
atcatctcaccttgcctcctgatacgatcacgtaccggcctgcaggttcccagaattgcgtttcctagagagattcccagaattgcgtttcctagagtcgttcccagaattgcgtttcctagaggacttcccagaattgcgtttcctagagctaggcgcgccatgcttcatcagactct

SEQ ID NO: 11301 - DNA, 179 bp, Artificial Sequence; identical to SEQ ID NO: 11300
  Synthetic polynucleotide

SEQ ID NO: 11302 - DNA, 186 bp, Artificial Sequence
  Synthetic polynucleotide
atcatctcaccttgcctcctgtgttcacagtgtaagttcctgcaggttcacacctagaggtgtgaaagattcacacctagaggtgtgaatcgttcacacctagaggtgtgaagacttcacacctagaggtgtgaactattcacacctagaggtgtgaaactggcgcgccatgcttcatcagactct

SEQ ID NO: 11303 - DNA, 186 bp, Artificial Sequence; identical to SEQ ID NO: 11302
  Synthetic polynucleotide

SEQ ID NO: 11304 - DNA, 156 bp, Artificial Sequence
  Synthetic polynucleotide
atcatctcaccttgcctcctgttgtacatctacgtgtccctgcaggatttattgagaatttattgtcgatttattggacatttattgctaatttattgactatttattgtgcatttattggtaatttattgggcgcgccatgcttcatcagactct

SEQ ID NO: 11305 - DNA, 156 bp, Artificial Sequence; identical to SEQ ID NO: 11304
  Synthetic polynucleotide

SEQ ID NO: 11306 - DNA, 197 bp, Artificial Sequence
  Synthetic polynucleotide
atcatctcaccttgcctcctggacctatatacgctaaacctgcaggaaaggtcatttgaggtcaagaaaaggtcatttgaggtcatcgaaaggtcatttgaggtcagacaaaggtcatttgaggtcactaaaaggtcatttgaggtcaactaaaggtcatttgaggtcatgcggcgcgccatgcttcatcagactct

SEQ ID NO: 11307 - DNA, 197 bp, Artificial Sequence; identical to SEQ ID NO: 11306
  Synthetic polynucleotide

SEQ ID NO: 11308 - DNA, 148 bp, Artificial Sequence
  Synthetic polynucleotide
atcatctcaccttgcctcctgcctgaagtttctcgcgccctgcagggtaaacaagagtaaacatcggtaaacagacgtaaacactagtaaacaactgtaaacatgcgtaaacagtagtaaacaggcgcgccatgcttcatcagactct

SEQ ID NO: 11309 - DNA, 148 bp, Artificial Sequence; identical to SEQ ID NO: 11308
  Synthetic polynucleotide

SEQ ID NO: 11310 - DNA, 140 bp, Artificial Sequence
  Synthetic polynucleotide
atcatctcaccttgcctcctgctcccataaggttcttccctgcaggggcgcgagaggcgcgtcgggcgcggacggcgcgctaggcgcgactggcgcgtgcggcgcggtaggcgcgggcgcgccatgcttcatcagactct

SEQ ID NO: 11311 - DNA, 140 bp, Artificial Sequence; identical to SEQ ID NO: 11310
  Synthetic polynucleotide

SEQ ID NO: 11312 - DNA, 191 bp, Artificial Sequence
  Synthetic polynucleotide
atcatctcaccttgcctcctggtttgcaggtttgccgccctgcaggtcgctttacagcgtcttagatcgctttacagcgtctttcgtcgctttacagcgtcttgactcgctttacagcgtcttctatcgctttacagcgtcttacttcgctttacagcgtctttgcggcgcgccatgcttcatcagactct

SEQ ID NO: 11313 - DNA, 191 bp, Artificial Sequence; identical to SEQ ID NO: 11312
  Synthetic polynucleotide

SEQ ID NO: 11314 - DNA, 191 bp, Artificial Sequence
  Synthetic polynucleotide
atcatctcaccttgcctcctgaacacttggctgagattcctgcaggaatcaattgcagtgattagaaatcaattgcagtgatttcgaatcaattgcagtgattgacaatcaattgcagtgattctaaatcaattgcagtgattactaatcaattgcagtgatttgcggcgcgccatgcttcatcagactct

SEQ ID NO: 11315 - DNA, 191 bp, Artificial Sequence; identical to SEQ ID NO: 11314
  Synthetic polynucleotide

SEQ ID NO: 11316 - DNA, 188 bp, Artificial Sequence
  Synthetic polynucleotide
atcatctcaccttgcctcctgttagtccgtatctgggccctgcaggttcgcgccaaacagattcgcgccaaactcgttcgcgccaaacgacttcgcgccaaacctattcgcgccaaacactttcgcgccaaactgcttcgcgccaaacgtattcgcgccaaacggcgcgccatgcttcatcagactct

SEQ ID NO: 11317 - DNA, 188 bp, Artificial Sequence; identical to SEQ ID NO: 11316
  Synthetic polynucleotide

SEQ ID NO: 11318 - DNA, 191 bp, Artificial Sequence
  Synthetic polynucleotide
atcatctcaccttgcctcctgaagatccaagaagcggacctgcaggaatatgctgactcagcaatttagaaatatgctgactcagcaattttcgaatatgctgactcagcaatttgacaatatgctgactcagcaatttctaaatatgctgactcagcaatttactggcgcgccatgcttcatcagactct

SEQ ID NO: 11319 - DNA, 191 bp, Artificial Sequence; identical to SEQ ID NO: 11318
  Synthetic polynucleotide

SEQ ID NO: 11320 - DNA, 197 bp, Artificial Sequence
  Synthetic polynucleotide
atcatctcaccttgcctcctgaagaaactcagcgtgtacctgcagggggtgaccttgacctagagggtgaccttgaccttcggggtgaccttgacctgacgggtgaccttgacctctagggtgaccttgacctactgggtgaccttgaccttgcgggtgaccttgacctgtaggcgcgccatgcttcatcagactct

SEQ ID NO: 11321 - DNA, 197 bp, Artificial Sequence; identical to SEQ ID NO: 11320
  Synthetic polynucleotide

SEQ ID NO: 11322 - DNA, 188 bp, Artificial Sequence
  Synthetic polynucleotide
atcatctcaccttgcctcctggtttcccgtgaaggtcgcctgcaggccatcaatcaaaagaccatcaatcaaatcgccatcaatcaaagacccatcaatcaaactaccatcaatcaaaactccatcaatcaaatgcccatcaatcaaagtaccatcaatcaaaggcgcgccatgcttcatcagactct

SEQ ID NO: 11323 - DNA, 188 bp, Artificial Sequence; identical to SEQ ID NO: 11322
  Synthetic polynucleotide

SEQ ID NO: 11324 - DNA, 164 bp, Artificial Sequence
  Synthetic polynucleotide
atcatctcaccttgcctcctgtcacgatagttgagtagcctgcaggccaggtgtgagaccaggtgtgtcgccaggtgtggacccaggtgtgctaccaggtgtgactccaggtgtgtgcccaggtgtggtaccaggtgtgggcgcgccatgcttcatcagactct

SEQ ID NO: 11325 - DNA, 164 bp, Artificial Sequence; identical to SEQ ID NO: 11324
  Synthetic polynucleotide

SEQ ID NO: 11326 - DNA, 172 bp, Artificial Sequence
  Synthetic polynucleotide
atcatctcaccttgcctcctgatggaccgtcattaacacctgcaggagggggcgctagaagggggcgcttcgagggggcgctgacagggggcgctctaagggggcgctactagggggcgcttgcagggggcgctgtaagggggcgctggcgcgccatgcttcatcagactct

SEQ ID NO: 11327 - DNA, 172 bp, Artificial Sequence; identical to SEQ ID NO: 11326
  Synthetic polynucleotide

SEQ ID NO: 11328 - DNA, 180 bp, Artificial Sequence
  Synthetic polynucleotide
atcatctcaccttgcctcctggattcttatccaatcagcctgcaggtggcacgtgccagatggcacgtgcctcgtggcacgtgccgactggcacgtgccctatggcacgtgccacttggcacgtgcctgctggcacgtgccgtatggcacgtgccggcgcgccatgcttcatcagactct

SEQ ID NO: 11329 - DNA, 180 bp, Artificial Sequence; identical to SEQ ID NO: 11328
  Synthetic polynucleotide

SEQ ID NO: 11330 - DNA, 180 bp, Artificial Sequence
  Synthetic polynucleotide
atcatctcaccttgcctcctgtgtgccgttatcctcaccctgcagggagcacgtggcagagagcacgtggctcggagcacgtggcgacgagcacgtggcctagagcacgtggcactgagcacgtggctgcgagcacgtggcgtagagcacgtggcggcgcgccatgcttcatcagactct

SEQ ID NO: 11331 - DNA, 180 bp, Artificial Sequence; identical to SEQ ID NO: 11330
  Synthetic polynucleotide

SEQ ID NO: 11332 - DNA, 180 bp, Artificial Sequence
  Synthetic polynucleotide
atcatctcaccttgcctcctgacctgcaagacagagcgcctgcaggccacttcccgcagaccacttcccgctcgccacttcccgcgacccacttcccgcctaccacttcccgcactccacttcccgctgcccacttcccgcgtaccacttcccgcggcgcgccatgcttcatcagactct

SEQ ID NO: 11333 - DNA, 180 bp, Artificial Sequence; identical to SEQ ID NO: 11332
  Synthetic polynucleotide

SEQ ID NO: 11334 - DNA, 190 bp, Artificial Sequence
  Synthetic polynucleotide
atcatctcaccttgcctcctggaatgtcatccaggcggcctgcagggacgaggctgtgggagagacgaggctgtgggtcggacgaggctgtggggacgacgaggctgtgggctagacgaggctgtgggactgacgaggctgtgggtgcgacgaggctgtggggtaggcgcgccatgcttcatcagactct

SEQ ID NO: 11335 - DNA, 190 bp, Artificial Sequence; identical to SEQ ID NO: 11334
  Synthetic polynucleotide

SEQ ID NO: 11336 - DNA, 191 bp, Artificial Sequence
  Synthetic polynucleotide
atcatctcaccttgcctcctgtgggcgatctgcgtaaacctgcaggtagccattaattaattaagatagccattaattaattatcgtagccattaattaattagactagccattaattaattactatagccattaattaattaacttagccattaattaattatgcggcgcgccatgcttcatcagactct

SEQ ID NO: 11337 - DNA, 191 bp, Artificial Sequence; identical to SEQ ID NO: 11336
  Synthetic polynucleotide

SEQ ID NO: 11338 - DNA, 156 bp, Artificial Sequence
  Synthetic polynucleotide
atcatctcaccttgcctcctgcagttacaacgacacgccctgcaggcagctgccagacagctgcctcgcagctgccgaccagctgccctacagctgccactcagctgcctgccagctgccgtacagctgccggcgcgccatgcttcatcagactct

SEQ ID NO: 11339 - DNA, 156 bp, Artificial Sequence; identical to SEQ ID NO: 11338
  Synthetic polynucleotide

SEQ ID NO: 11340 - DNA, 172 bp, Artificial Sequence
  Synthetic polynucleotide
atcatctcaccttgcctcctggtgcatctggaaccctgcctgcaggcacgcacttgagacacgcacttgtcgcacgcacttggaccacgcacttgctacacgcacttgactcacgcacttgtgccacgcacttggtacacgcacttgggcgcgccatgcttcatcagactct

SEQ ID NO: 11341 - DNA, 172 bp, Artificial Sequence; identical to SEQ ID NO: 11340
  Synthetic polynucleotide

SEQ ID NO: 11342 - DNA, 188 bp, Artificial Sequence
  Synthetic polynucleotide
atcatctcaccttgcctcctgatcttcagggtagtttccctgcagggaccaatcagaaagagaccaatcagaatcggaccaatcagaagacgaccaatcagaactagaccaatcagaaactgaccaatcagaatgcgaccaatcagaagtagaccaatcagaaggcgcgccatgcttcatcagactct

SEQ ID NO: 11343 - DNA, 188 bp, Artificial Sequence; identical to SEQ ID NO: 11342
  Synthetic polynucleotide

SEQ ID NO: 11344 - DNA, 164 bp, Artificial Sequence
  Synthetic polynucleotide
atcatctcaccttgcctcctggcattcggtctagccgacctgcaggccaggtgttagaccaggtgtttcgccaggtgttgacccaggtgttctaccaggtgttactccaggtgtttgcccaggtgttgtaccaggtgttggcgcgccatgcttcatcagactct

SEQ ID NO: 11345 - DNA, 164 bp, Artificial Sequence; identical to SEQ ID NO: 11344
  Synthetic polynucleotide

SEQ ID NO: 11346 - DNA, 185 bp, Artificial Sequence
  Synthetic polynucleotide
atcatctcaccttgcctcctggagtgtggcatttattacctgcaggtatcgaccccccacagagatatcgaccccccacagtcgtatcgaccccccacaggactatcgaccccccacagctatatcgaccccccacagacttatcgaccccccacagtgcggcgcgccatgcttcatcagactct

SEQ ID NO: 11347 - DNA, 185 bp, Artificial Sequence; identical to SEQ ID NO: 11346
  Synthetic polynucleotide

SEQ ID NO: 11348 - DNA, 190 bp, Artificial Sequence
  Synthetic polynucleotide
atcatctcaccttgcctcctgctgaggcaatgaccacccctgcaggaaaaagcggaagtaagaaaaaagcggaagtatcgaaaaagcggaagtagacaaaaagcggaagtactaaaaaagcggaagtaactaaaaagcggaagtatgcaaaaagcggaagtagtaggcgcgccatgcttcatcagactct

SEQ ID NO: 11349 - DNA, 190 bp, Artificial Sequence; identical to SEQ ID NO: 11348
  Synthetic polynucleotide

SEQ ID NO: 11350 - DNA, 180 bp, Artificial Sequence
  Synthetic polynucleotide
atcatctcaccttgcctcctgtatgcacgtctcggagacctgcaggtttccccacacagatttccccacactcgtttccccacacgactttccccacacctatttccccacacacttttccccacactgctttccccacacgtatttccccacacggcgcgccatgcttcatcagactct

SEQ ID NO: 11351 - DNA, 180 bp, Artificial Sequence; identical to SEQ ID NO: 11350
  Synthetic polynucleotide

SEQ ID NO: 11352 - DNA, 191 bp, Artificial Sequence
  Synthetic polynucleotide
atcatctcaccttgcctcctgatcagggttacgtaatgcctgcaggggtgattaattaattcgagaggtgattaattaattcgtcgggtgattaattaattcggacggtgattaattaattcgctaggtgattaattaattcgactggtgattaattaattcgtgcggcgcgccatgcttcatcagactct

SEQ ID NO: 11353 - DNA, 191 bp, Artificial Sequence; identical to SEQ ID NO: 11352
  Synthetic polynucleotide

SEQ ID NO: 11354 - DNA, 188 bp, Artificial Sequence
  Synthetic polynucleotide
atcatctcaccttgcctcctgttgcacggcatgaaagccctgcaggcgttgacgtcacagacgttgacgtcactcgcgttgacgtcacgaccgttgacgtcacctacgttgacgtcacactcgttgacgtcactgccgttgacgtcacgtacgttgacgtcacggcgcgccatgcttcatcagactct

SEQ ID NO: 11355 - DNA, 188 bp, Artificial Sequence; identical to SEQ ID NO: 11354
  Synthetic polynucleotide

SEQ ID NO: 11356 - DNA, 190 bp, Artificial Sequence
  Synthetic polynucleotide
atcatctcaccttgcctcctgcgggtaaatggcaagttcctgcagggggccgtgtgcagaagagggccgtgtgcagatcggggccgtgtgcagagacgggccgtgtgcagactagggccgtgtgcagaactgggccgtgtgcagatgcgggccgtgtgcagagtaggcgcgccatgcttcatcagactct

SEQ ID NO: 11357 - DNA, 190 bp, Artificial Sequence; identical to SEQ ID NO: 11356
  Synthetic polynucleotide

SEQ ID NO: 11358 - DNA, 197 bp, Artificial Sequence
  Synthetic polynucleotide
atcatctcaccttgcctcctgactcctcagtatcgacgcctgcaggcaagatggcggccgcagacaagatggcggccgctcgcaagatggcggccgcgaccaagatggcggccgcctacaagatggcggccgcactcaagatggcggccgctgccaagatggcggccgcgtaggcgcgccatgcttcatcagactct

SEQ ID NO: 11359 - DNA, 197 bp, Artificial Sequence; identical to SEQ ID NO: 11358
  Synthetic polynucleotide

SEQ ID NO: 11360 - DNA, 188 bp, Artificial Sequence
  Synthetic polynucleotide
atcatctcaccttgcctcctgcagattactcggcttggcctgcaggatgcgtgggcgtagaatgcgtgggcgttcgatgcgtgggcgtgacatgcgtgggcgtctaatgcgtgggcgtactatgcgtgggcgttgcatgcgtgggcgtgtaatgcgtgggcgtggcgcgccatgcttcatcagactct

SEQ ID NO: 11361 - DNA, 188 bp, Artificial Sequence; identical to SEQ ID NO: 11360
  Synthetic polynucleotide

SEQ ID NO: 11362 - DNA, 156 bp, Artificial Sequence
  Synthetic polynucleotide
atcatctcaccttgcctcctggtgaaggtagctaaacacctgcaggtcatgtgaagatcatgtgatcgtcatgtgagactcatgtgactatcatgtgaacttcatgtgatgctcatgtgagtatcatgtgaggcgcgccatgcttcatcagactct

SEQ ID NO: 11363 - DNA, 156 bp, Artificial Sequence; identical to SEQ ID NO: 11362
  Synthetic polynucleotide

SEQ ID NO: 11364 - DNA, 180 bp, Artificial Sequence
  Synthetic polynucleotide
atcatctcaccttgcctcctgtgatggaggctgaatggcctgcaggtgtggattggaagatgtggattggatcgtgtggattggagactgtggattggactatgtggattggaacttgtggattggatgctgtggattggagtatgtggattggaggcgcgccatgcttcatcagactct

SEQ ID NO: 11365 - DNA, 180 bp, Artificial Sequence; identical to SEQ ID NO: 11364
  Synthetic polynucleotide

SEQ ID NO: 11366 - DNA, 196 bp, Artificial Sequence
  Synthetic polynucleotide
atcatctcaccttgcctcctgtttcggagggtgtctaacctgcagggggtcacgtgaccagagggtcacgtgacctcggggtcacgtgaccgacgggtcacgtgaccctagggtcacgtgaccactgggtcacgtgacctgcgggtcacgtgaccgtagggtcacgtgaccggcgcgccatgcttcatcagactct

SEQ ID NO: 11367 - DNA, 196 bp, Artificial Sequence; identical to SEQ ID NO: 11366
  Synthetic polynucleotide

SEQ ID NO: 11368 - DNA, 180 bp, Artificial Sequence
  Synthetic polynucleotide
atcatctcaccttgcctcctgattatgccttatacgcacctgcaggtctgacctttgagatctgacctttgtcgtctgacctttggactctgacctttgctatctgacctttgacttctgacctttgtgctctgacctttggtatctgacctttgggcgcgccatgcttcatcagactct

SEQ ID NO: 11369 - DNA, 180 bp, Artificial Sequence; identical to SEQ ID NO: 11368
  Synthetic polynucleotide

SEQ ID NO: 11370 - DNA, 197 bp, Artificial Sequence
  Synthetic polynucleotide
atcatctcaccttgcctcctgggtcaaactgggcactacctgcagggtggaaaactccatgagagtggaaaactccatgtcggtggaaaactccatggacgtggaaaactccatgctagtggaaaactccatgactgtggaaaactccatgtgcgtggaaaactccatggtaggcgcgccatgcttcatcagactct

SEQ ID NO: 11371 - DNA, 197 bp, Artificial Sequence; identical to SEQ ID NO: 11370
  Synthetic polynucleotide

SEQ ID NO: 11372 - DNA, 180 bp, Artificial Sequence
  Synthetic polynucleotide
atcatctcaccttgcctcctgccgacgccaagatcctacctgcagggtccccagggaagagtccccagggatcggtccccagggagacgtccccagggactagtccccagggaactgtccccagggatgcgtccccagggagtagtccccagggaggcgcgccatgcttcatcagactct

SEQ ID NO: 11373 - DNA, 180 bp, Artificial Sequence; identical to SEQ ID NO: 11372
  Synthetic polynucleotide

SEQ ID NO: 11374 - DNA, 172 bp, Artificial Sequence
  Synthetic polynucleotide
atcatctcaccttgcctcctgtgcggatatccaggactcctgcaggtaaacaaagaagataaacaaagatcgtaaacaaagagactaaacaaagactataaacaaagaacttaaacaaagatgctaaacaaagagtataaacaaagaggcgcgccatgcttcatcagactct

SEQ ID NO: 11375 - DNA, 172 bp, Artificial Sequence; identical to SEQ ID NO: 11374
  Synthetic polynucleotide

SEQ ID NO: 11376 - DNA, 172 bp, Artificial Sequence
  Synthetic polynucleotide
atcatctcaccttgcctcctgatttccttgctatctctcctgcagggatgacgtaaagagatgacgtaatcggatgacgtaagacgatgacgtaactagatgacgtaaactgatgacgtaatgcgatgacgtaagtagatgacgtaaggcgcgccatgcttcatcagactct

SEQ ID NO: 11377 - DNA, 172 bp, Artificial Sequence; identical to SEQ ID NO: 11376
  Synthetic polynucleotide

SEQ ID NO: 11378 - DNA, 164 bp, Artificial Sequence
  Synthetic polynucleotide
atcatctcaccttgcctcctggacctgtgcctaggaaccctgcaggaggagctgtagaaggagctgttcgaggagctgtgacaggagctgtctaaggagctgtactaggagctgttgcaggagctgtgtaaggagctgtggcgcgccatgcttcatcagactct

SEQ ID NO: 11379 - DNA, 164 bp, Artificial Sequence; identical to SEQ ID NO: 11378
  Synthetic polynucleotide

SEQ ID NO: 11380 - DNA, 180 bp, Artificial Sequence
  Synthetic polynucleotide
atcatctcaccttgcctcctgtcgcaacaattggacgacctgcagggctgttaccctagagctgttacccttcggctgttaccctgacgctgttaccctctagctgttaccctactgctgttacccttgcgctgttaccctgtagctgttaccctggcgcgccatgcttcatcagactct

SEQ ID NO: 11381 - DNA, 180 bp, Artificial Sequence; identical to SEQ ID NO: 11380
  Synthetic polynucleotide

SEQ ID NO: 11382 - DNA, 172 bp, Artificial Sequence
  Synthetic polynucleotide
atcatctcaccttgcctcctggacaggcttcggattcgcctgcaggttttatgaccagattttatgacctcgttttatgaccgacttttatgaccctattttatgaccactttttatgacctgcttttatgaccgtattttatgaccggcgcgccatgcttcatcagactct

SEQ ID NO: 11383 - DNA, 172 bp, Artificial Sequence; identical to SEQ ID NO: 11382
  Synthetic polynucleotide

SEQ ID NO: 11384 - DNA, 132 bp, Artificial Sequence
  Synthetic polynucleotide
atcatctcaccttgcctcctgttacactcgtagtcacccctgcaggtgacaagatgacatcgtgacagactgacactatgacaacttgacatgctgacagtatgacaggcgcgccatgcttcatcagactct

SEQ ID NO: 11385 - DNA, 132 bp, Artificial Sequence; identical to SEQ ID NO: 11384
  Synthetic polynucleotide

SEQ ID NO: 11386 - DNA, 140 bp, Artificial Sequence
  Synthetic polynucleotide
atcatctcaccttgcctcctgtcttcccgggtcaatagcctgcaggacaaagagaacaaagtcgacaaaggacacaaagctaacaaagactacaaagtgcacaaaggtaacaaagggcgcgccatgcttcatcagactct

SEQ ID NO: 11387 - DNA, 140 bp, Artificial Sequence; identical to SEQ ID NO: 11386
  Synthetic polynucleotide

SEQ ID NO: 11388 - DNA, 196 bp, Artificial Sequence
  Synthetic polynucleotide
atcatctcaccttgcctcctgccgatgactgaagaatgcctgcaggtatttacgtaacaagatatttacgtaacatcgtatttacgtaacagactatttacgtaacactatatttacgtaacaacttatttacgtaacatgctatttacgtaacagtatatttacgtaacaggcgcgccatgcttcatcagactct

SEQ ID NO: 11389 - DNA, 196 bp, Artificial Sequence; identical to SEQ ID NO: 11388
  Synthetic polynucleotide

SEQ ID NO: 11390 - DNA, 172 bp, Artificial Sequence
  Synthetic polynucleotide
atcatctcaccttgcctcctgcgatctcagcacactagcctgcaggctcaactggcagactcaactggctcgctcaactggcgacctcaactggcctactcaactggcactctcaactggctgcctcaactggcgtactcaactggcggcgcgccatgcttcatcagactct

SEQ ID NO: 11391 - DNA, 172 bp, Artificial Sequence; identical to SEQ ID NO: 11390
  Synthetic polynucleotide

SEQ ID NO: 11392 - DNA, 164 bp, Artificial Sequence
  Synthetic polynucleotide
atcatctcaccttgcctcctgttatccttggtactccccctgcaggcgtgggaaaagacgtgggaaatcgcgtgggaaagaccgtgggaaactacgtgggaaaactcgtgggaaatgccgtgggaaagtacgtgggaaaggcgcgccatgcttcatcagactct

SEQ ID NO: 11393 - DNA, 164 bp, Artificial Sequence; identical to SEQ ID NO: 11392
  Synthetic polynucleotide

SEQ ID NO: 11394 - DNA, 180 bp, Artificial Sequence
  Synthetic polynucleotide
atcatctcaccttgcctcctgcattgcaggaggtgttccctgcagggtcacgcaatgagagtcacgcaatgtcggtcacgcaatggacgtcacgcaatgctagtcacgcaatgactgtcacgcaatgtgcgtcacgcaatggtagtcacgcaatgggcgcgccatgcttcatcagactct

SEQ ID NO: 11395 - DNA, 180 bp, Artificial Sequence; identical to SEQ ID NO: 11394
  Synthetic polynucleotide

SEQ ID NO: 11396 - DNA, 185 bp, Artificial Sequence
  Synthetic polynucleotide
atcatctcaccttgcctcctgataatcatcgctgctatcctgcaggattggactttggacccagaattggactttggaccctcgattggactttggacccgacattggactttggacccctaattggactttggacccactattggactttggaccctgcggcgcgccatgcttcatcagactct

SEQ ID NO: 11397 - DNA, 185 bp, Artificial Sequence; identical to SEQ ID NO: 11396
  Synthetic polynucleotide

SEQ ID NO: 11398 - DNA, 172 bp, Artificial Sequence
  Synthetic polynucleotide
atcatctcaccttgcctcctggggatggtgccctaactcctgcaggggggattcccagaggggattccctcgggggattcccgacggggattcccctaggggattcccactggggattccctgcggggattcccgtaggggattcccggcgcgccatgcttcatcagactct

SEQ ID NO: 11399 - DNA, 172 bp, Artificial Sequence; identical to SEQ ID NO: 11398
  Synthetic polynucleotide

SEQ ID NO: 11400 - DNA, 156 bp, Artificial Sequence
  Synthetic polynucleotide
atcatctcaccttgcctcctgatgtggaggtcttcgtgcctgcagggcgcgcggagagcgcgcggtcggcgcgcgggacgcgcgcggctagcgcgcggactgcgcgcggtgcgcgcgcgggtagcgcgcggggcgcgccatgcttcatcagactct

SEQ ID NO: 11401 - DNA, 156 bp, Artificial Sequence; identical to SEQ ID NO: 11400
  Synthetic polynucleotide

SEQ ID NO: 11402 - DNA, 200 bp, Artificial Sequence
  Synthetic polynucleotide
atcatctcaccttgcctcctgctctcagaatgtatatgcctgcaggtgacctactaacctagttaagatgacctactaacctagttatcgtgacctactaacctagttagactgacctactaacctagttactatgacctactaacctagttaacttgacctactaacctagttaggcgcgccatgcttcatcagactct

SEQ ID NO: 11403 - DNA, 200 bp, Artificial Sequence; identical to SEQ ID NO: 11402
  Synthetic polynucleotide

SEQ ID NO: 11404 - DNA, 172 bp, Artificial Sequence
  Synthetic polynucleotide
atcatctcaccttgcctcctggaatgctttagggaggtcctgcaggcctttgatgtagacctttgatgttcgcctttgatgtgaccctttgatgtctacctttgatgtactcctttgatgttgccctttgatgtgtacctttgatgtggcgcgccatgcttcatcagactct

SEQ ID NO: 11405 - DNA, 172 bp, Artificial Sequence; identical to SEQ ID NO: 11404
  Synthetic polynucleotide

SEQ ID NO: 11406 - DNA, 156 bp, Artificial Sequence
  Synthetic polynucleotide
atcatctcaccttgcctcctgggctacatatgtcgaaccctgcaggaattgataagaaattgatatcgaattgatagacaattgatactaaattgataactaattgatatgcaattgatagtaaattgataggcgcgccatgcttcatcagactct

SEQ ID NO: 11407 - DNA, 156 bp, Artificial Sequence; identical to SEQ ID NO: 11406
  Synthetic polynucleotide

SEQ ID NO: 11408 - DNA, 188 bp, Artificial Sequence
  Synthetic polynucleotide
atcatctcaccttgcctcctgcatccagcgaagagacacctgcaggcaacatatgcgaagacaacatatgcgatcgcaacatatgcgagaccaacatatgcgactacaacatatgcgaactcaacatatgcgatgccaacatatgcgagtacaacatatgcgaggcgcgccatgcttcatcagactct

SEQ ID NO: 11409 - DNA, 188 bp, Artificial Sequence; identical to SEQ ID NO: 11408
  Synthetic polynucleotide

SEQ ID NO: 11410 - DNA, 185 bp, Artificial Sequence
  Synthetic polynucleotide
atcatctcaccttgcctcctgtataagtagtgtatccgcctgcaggtgaccgccagtaacccagatgaccgccagtaaccctcgtgaccgccagtaacccgactgaccgccagtaacccctatgaccgccagtaacccacttgaccgccagtaaccctgcggcgcgccatgcttcatcagactct

SEQ ID NO: 11411 - DNA, 185 bp, Artificial Sequence; identical to SEQ ID NO: 11410
  Synthetic polynucleotide

SEQ ID NO: 11412 - DNA, 190 bp, Artificial Sequence
  Synthetic polynucleotide
atcatctcaccttgcctcctgaaattagatgactgacccctgcaggggggcccaagggggagaggggcccaagggggtcgggggcccaaggggggacggggcccaagggggctaggggcccaagggggactggggcccaagggggtgcggggcccaaggggggtaggcgcgccatgcttcatcagactct

SEQ ID NO: 11413 - DNA, 190 bp, Artificial Sequence; identical to SEQ ID NO: 11412
  Synthetic polynucleotide

SEQ ID NO: 11414 - DNA, 172 bp, Artificial Sequence
  Synthetic polynucleotide
atcatctcaccttgcctcctgtccttgtacagagacgtcctgcaggtgtttactcaagatgtttactcatcgtgtttactcagactgtttactcactatgtttactcaacttgtttactcatgctgtttactcagtatgtttactcaggcgcgccatgcttcatcagactct

SEQ ID NO: 11415 - DNA, 172 bp, Artificial Sequence; identical to SEQ ID NO: 11414
  Synthetic polynucleotide

SEQ ID NO: 11416 - DNA, 156 bp, Artificial Sequence
  Synthetic polynucleotide
atcatctcaccttgcctcctgctccgggttctcaatagcctgcaggcttcctctagacttcctcttcgcttcctctgaccttcctctctacttcctctactcttcctcttgccttcctctgtacttcctctggcgcgccatgcttcatcagactct

SEQ ID NO: 11417 - DNA, 156 bp, Artificial Sequence; identical to SEQ ID NO: 11416
  Synthetic polynucleotide

SEQ ID NO: 11418 - DNA, 190 bp, Artificial Sequence
  Synthetic polynucleotide
atcatctcaccttgcctcctggcaaataggcgagtggtcctgcaggttttcccgccaattagattttcccgccaatttcgttttcccgccaattgacttttcccgccaattctattttcccgccaattactttttcccgccaatttgcttttcccgccaattgtaggcgcgccatgcttcatcagactct

SEQ ID NO: 11419 - DNA, 190 bp, Artificial Sequence; identical to SEQ ID NO: 11418
  Synthetic polynucleotide

SEQ ID NO: 11420 - DNA, 172 bp, Artificial Sequence
  Synthetic polynucleotide
atcatctcaccttgcctcctgatacaattgattgagcccctgcaggccaaatttggagaccaaatttggtcgccaaatttgggacccaaatttggctaccaaatttggactccaaatttggtgcccaaatttgggtaccaaatttggggcgcgccatgcttcatcagactct

SEQ ID NO: 11421 - DNA, 172 bp, Artificial Sequence; identical to SEQ ID NO: 11420
  Synthetic polynucleotide

SEQ ID NO: 11422 - DNA, 164 bp, Artificial Sequence
  Synthetic polynucleotide
atcatctcaccttgcctcctgggagagcgagccgatatcctgcaggccctctagtagaccctctagttcgccctctagtgacccctctagtctaccctctagtactccctctagttgcccctctagtgtaccctctagtggcgcgccatgcttcatcagactct

SEQ ID NO: 11423 - DNA, 164 bp, Artificial Sequence; identical to SEQ ID NO: 11422
  Synthetic polynucleotide

SEQ ID NO: 11424 - DNA, 191 bp, Artificial Sequence
  Synthetic polynucleotide
atcatctcaccttgcctcctggtcggcactcaaatcaacctgcaggttggccggcgggcctgtcactagattggccggcgggcctgtcacttcgttggccggcgggcctgtcactgacttggccggcgggcctgtcactctattggccggcgggcctgtcactactggcgcgccatgcttcatcagactct

SEQ ID NO: 11425 - DNA, 191 bp, Artificial Sequence; identical to SEQ ID NO: 11424
  Synthetic polynucleotide

SEQ ID NO: 11426 - DNA, 191 bp, Artificial Sequence
  Synthetic polynucleotide
atcatctcaccttgcctcctgccctgtaaagaggaatacctgcagggggggggggacatggtgttcttgggggagagggggggggacatggtgttcttgggggtcggggggggggacatggtgttcttggggggacgggggggggacatggtgttcttgggggctaggcgcgccatgcttcatcagactct

SEQ ID NO: 11427 - DNA, 191 bp, Artificial Sequence; identical to SEQ ID NO: 11426
  Synthetic polynucleotide

SEQ ID NO: 11428 - DNA, 196 bp, Artificial Sequence
  Synthetic polynucleotide
atcatctcaccttgcctcctgcacatcctgttcaagcacctgcaggagatgatagagccagaagatgatagagcctcgagatgatagagccgacagatgatagagccctaagatgatagagccactagatgatagagcctgcagatgatagagccgtaagatgatagagccggcgcgccatgcttcatcagactct

SEQ ID NO: 11429 - DNA, 196 bp, Artificial Sequence; identical to SEQ ID NO: 11428
  Synthetic polynucleotide

SEQ ID NO: 11430 - DNA, 172 bp, Artificial Sequence
  Synthetic polynucleotide
atcatctcaccttgcctcctgatgcggtactggcctgacctgcaggaacatatggtagaaacatatggttcgaacatatggtgacaacatatggtctaaacatatggtactaacatatggttgcaacatatggtgtaaacatatggtggcgcgccatgcttcatcagactct

SEQ ID NO: 11431 - DNA, 172 bp, Artificial Sequence; identical to SEQ ID NO: 11430
  Synthetic polynucleotide

SEQ ID NO: 11432 - DNA, 197 bp, Artificial Sequence
  Synthetic polynucleotide
atcatctcaccttgcctcctggtcgaactaatattcaccctgcaggaggtgagtgacagctagaaggtgagtgacagcttcgaggtgagtgacagctgacaggtgagtgacagctctaaggtgagtgacagctactaggtgagtgacagcttgcaggtgagtgacagctgtaggcgcgccatgcttcatcagactct

SEQ ID NO: 11433 - DNA, 197 bp, Artificial Sequence; identical to SEQ ID NO: 11432
  Synthetic polynucleotide

SEQ ID NO: 11434 - DNA, 197 bp, Artificial Sequence
  Synthetic polynucleotide
atcatctcaccttgcctcctgagcatttctgaatgacccctgcaggaacatgttgggacatgtcagaaacatgttgggacatgtctcgaacatgttgggacatgtcgacaacatgttgggacatgtcctaaacatgttgggacatgtcactaacatgttgggacatgtctgcggcgcgccatgcttcatcagactct

SEQ ID NO: 11435 - DNA, 197 bp, Artificial Sequence; identical to SEQ ID NO: 11434
  Synthetic polynucleotide

SEQ ID NO: 11436 - DNA, 164 bp, Artificial Sequence
  Synthetic polynucleotide
atcatctcaccttgcctcctgaatacccaacgctattacctgcaggggggtcacgagaggggtcacgtcgggggtcacggacggggtcacgctaggggtcacgactggggtcacgtgcggggtcacggtaggggtcacgggcgcgccatgcttcatcagactct

SEQ ID NO: 11437 - DNA, 164 bp, Artificial Sequence; identical to SEQ ID NO: 11436
  Synthetic polynucleotide

SEQ ID NO: 11438 - DNA, 197 bp, Artificial Sequence
  Synthetic polynucleotide
atcatctcaccttgcctcctgcacagcgacagcatcttcctgcaggttcgaacgtttcgaaagattcgaacgtttcgaatcgttcgaacgtttcgaagacttcgaacgtttcgaactattcgaacgtttcgaaactttcgaacgtttcgaatgcttcgaacgtttcgaagtaggcgcgccatgcttcatcagactct

SEQ ID NO: 11439 - DNA, 197 bp, Artificial Sequence; identical to SEQ ID NO: 11438
  Synthetic polynucleotide

SEQ ID NO: 11440 - DNA, 148 bp, Artificial Sequence
  Synthetic polynucleotide
atcatctcaccttgcctcctggcagattattcatacgtcctgcaggcccccgcagacccccgctcgcccccgcgaccccccgcctacccccgcactcccccgctgccccccgcgtacccccgcggcgcgccatgcttcatcagactct

SEQ ID NO: 11441 - DNA, 148 bp, Artificial Sequence; identical to SEQ ID NO: 11440
  Synthetic polynucleotide

SEQ ID NO: 11442 - DNA, 190 bp, Artificial Sequence
  Synthetic polynucleotide
atcatctcaccttgcctcctggccgaagagctggatagcctgcagggaatgacacagcgaagagaatgacacagcgatcggaatgacacagcgagacgaatgacacagcgactagaatgacacagcgaactgaatgacacagcgatgcgaatgacacagcgagtaggcgcgccatgcttcatcagactct

SEQ ID NO: 11443 - DNA, 190 bp, Artificial Sequence; identical to SEQ ID NO: 11442
  Synthetic polynucleotide

SEQ ID NO: 11444 - DNA, 164 bp, Artificial Sequence
  Synthetic polynucleotide
atcatctcaccttgcctcctgaacaatttcgacttccacctgcaggttaatccccagattaatcccctcgttaatccccgacttaatccccctattaatccccactttaatcccctgcttaatccccgtattaatccccggcgcgccatgcttcatcagactct

SEQ ID NO: 11445 - DNA, 164 bp, Artificial Sequence; identical to SEQ ID NO: 11444
  Synthetic polynucleotide

SEQ ID NO: 11446 - DNA, 188 bp, Artificial Sequence
  Synthetic polynucleotide
atcatctcaccttgcctcctgcagggttagggcgaatgcctgcagggtccccagggacagagtccccagggactcggtccccagggacgacgtccccagggacctagtccccagggacactgtccccagggactgcgtccccagggacgtagtccccagggacggcgcgccatgcttcatcagactct

SEQ ID NO: 11447 - DNA, 188 bp, Artificial Sequence; identical to SEQ ID NO: 11446
  Synthetic polynucleotide

SEQ ID NO: 11448 - DNA, 180 bp, Artificial Sequence
  Synthetic polynucleotide
atcatctcaccttgcctcctgagcacttgccagttcatcctgcaggttgtttacattagattgtttacatttcgttgtttacattgacttgtttacattctattgtttacattactttgtttacatttgcttgtttacattgtattgtttacattggcgcgccatgcttcatcagactct

SEQ ID NO: 11449 - DNA, 180 bp, Artificial Sequence; identical to SEQ ID NO: 11448
  Synthetic polynucleotide

SEQ ID NO: 11450 - DNA, 180 bp, Artificial Sequence
  Synthetic polynucleotide
atcatctcaccttgcctcctgttcccgctccagtcacacctgcagggtcacgtgggcagagtcacgtgggctcggtcacgtgggcgacgtcacgtgggcctagtcacgtgggcactgtcacgtgggctgcgtcacgtgggcgtagtcacgtgggcggcgcgccatgcttcatcagactct

SEQ ID NO: 11451 - DNA, 180 bp, Artificial Sequence; identical to SEQ ID NO: 11450
  Synthetic polynucleotide

SEQ ID NO: 11452 - DNA, 156 bp, Artificial Sequence
  Synthetic polynucleotide
atcatctcaccttgcctcctgtactggccagccatgatcctgcaggatatgataagaatatgatatcgatatgatagacatatgatactaatatgataactatatgatatgcatatgatagtaatatgataggcgcgccatgcttcatcagactct

SEQ ID NO: 11453 - DNA, 156 bp, Artificial Sequence; identical to SEQ ID NO: 11452
  Synthetic polynucleotide

SEQ ID NO: 11454 - DNA, 191 bp, Artificial Sequence
  Synthetic polynucleotide
atcatctcaccttgcctcctgcatcactaatgcaatagcctgcaggaaaaagtaaacaaagacagaaaaaagtaaacaaagactcgaaaaagtaaacaaagacgacaaaaagtaaacaaagacctaaaaaagtaaacaaagacactaaaaagtaaacaaagactgcggcgcgccatgcttcatcagactct

SEQ ID NO: 11455 - DNA, 191 bp, Artificial Sequence; identical to SEQ ID NO: 11454
  Synthetic polynucleotide

SEQ ID NO: 11456 - DNA, 172 bp, Artificial Sequence
  Synthetic polynucleotide
atcatctcaccttgcctcctgaatggtgtacgtcgttacctgcaggcggacacaatagacggacacaattcgcggacacaatgaccggacacaatctacggacacaatactcggacacaattgccggacacaatgtacggacacaatggcgcgccatgcttcatcagactct

SEQ ID NO: 11457 - DNA, 172 bp, Artificial Sequence; identical to SEQ ID NO: 11456
  Synthetic polynucleotide

SEQ ID NO: 11458 - DNA, 197 bp, Artificial Sequence
  Synthetic polynucleotide
atcatctcaccttgcctcctgcccaagtattgaccggtcctgcaggagaaccagctgcggtcagagaagaaccagctgcggtcagtcgagaaccagctgcggtcaggacagaaccagctgcggtcagctaagaaccagctgcggtcagactagaaccagctgcggtcagtgcggcgcgccatgcttcatcagactct

SEQ ID NO: 11459 - DNA, 197 bp, Artificial Sequence; identical to SEQ ID NO: 11458
  Synthetic polynucleotide

SEQ ID NO: 11460 - DNA, 180 bp, Artificial Sequence
  Synthetic polynucleotide
atcatctcaccttgcctcctgcgacgaaatgcctcaaacctgcaggagggccagttgagaagggccagttgtcgagggccagttggacagggccagttgctaagggccagttgactagggccagttgtgcagggccagttggtaagggccagttgggcgcgccatgcttcatcagactct

SEQ ID NO: 11461 - DNA, 180 bp, Artificial Sequence; identical to SEQ ID NO: 11460
  Synthetic polynucleotide

SEQ ID NO: 11462 - DNA, 190 bp, Artificial Sequence
  Synthetic polynucleotide
atcatctcaccttgcctcctggaatccctggaatagtgcctgcaggccctccccaaggctagaccctccccaaggcttcgccctccccaaggctgacccctccccaaggctctaccctccccaaggctactccctccccaaggcttgcccctccccaaggctgtaggcgcgccatgcttcatcagactct

SEQ ID NO: 11463 - DNA, 190 bp, Artificial Sequence; identical to SEQ ID NO: 11462
  Synthetic polynucleotide

SEQ ID NO: 11464 - DNA, 172 bp, Artificial Sequence
  Synthetic polynucleotide
atcatctcaccttgcctcctgaacggaaacgatgccatcctgcaggccccgcccccagaccccgccccctcgccccgcccccgacccccgcccccctaccccgcccccactccccgccccctgcccccgcccccgtaccccgcccccggcgcgccatgcttcatcagactct

SEQ ID NO: 11465 - DNA, 172 bp, Artificial Sequence; identical to SEQ ID NO: 11464
  Synthetic polynucleotide

SEQ ID NO: 11466 - DNA, 148 bp, Artificial Sequence
  Synthetic polynucleotide
atcatctcaccttgcctcctgaactcagggtagatcctcctgcaggtctttgtagatctttgttcgtctttgtgactctttgtctatctttgtacttctttgttgctctttgtgtatctttgtggcgcgccatgcttcatcagactct

SEQ ID NO: 11467 - DNA, 148 bp, Artificial Sequence; identical to SEQ ID NO: 11466
  Synthetic polynucleotide

SEQ ID NO: 11468 - DNA, 164 bp, Artificial Sequence
  Synthetic polynucleotide
atcatctcaccttgcctcctgcatctgtaagaaagcggcctgcaggagggcccccagaagggccccctcgagggcccccgacagggcccccctaagggcccccactagggccccctgcagggcccccgtaagggcccccggcgcgccatgcttcatcagactct

SEQ ID NO: 11469 - DNA, 164 bp, Artificial Sequence; identical to SEQ ID NO: 11468
  Synthetic polynucleotide

SEQ ID NO: 11470 - DNA, 197 bp, Artificial Sequence
  Synthetic polynucleotide
atcatctcaccttgcctcctgtcgtttcagttctattgcctgcaggctggactttggactcagactggactttggactctcgctggactttggactcgacctggactttggactcctactggactttggactcactctggactttggactctgcctggactttggactcgtaggcgcgccatgcttcatcagactct

SEQ ID NO: 11471 - DNA, 197 bp, Artificial Sequence; identical to SEQ ID NO: 11470
  Synthetic polynucleotide

SEQ ID NO: 11472 - DNA, 197 bp, Artificial Sequence
  Synthetic polynucleotide
atcatctcaccttgcctcctgatagcgccaactgcaatcctgcaggcccatataaggagatggcagacccatataaggagatggctcgcccatataaggagatggcgaccccatataaggagatggcctacccatataaggagatggcactcccatataaggagatggctgcggcgcgccatgcttcatcagactct

SEQ ID NO: 11473 - DNA, 197 bp, Artificial Sequence; identical to SEQ ID NO: 11472
  Synthetic polynucleotide

SEQ ID NO: 11474 - DNA, 172 bp, Artificial Sequence
  Synthetic polynucleotide
atcatctcaccttgcctcctggcatggacatattcccacctgcaggtcttatctatagatcttatctattcgtcttatctatgactcttatctatctatcttatctatacttcttatctattgctcttatctatgtatcttatctatggcgcgccatgcttcatcagactct

SEQ ID NO: 11475 - DNA, 172 bp, Artificial Sequence; identical to SEQ ID NO: 11474
  Synthetic polynucleotide

SEQ ID NO: 11476 - DNA, 185 bp, Artificial Sequence
  Synthetic polynucleotide
atcatctcaccttgcctcctgtccagcccgagtttacgcctgcaggtttattaattgccggtagatttattaattgccggttcgtttattaattgccggtgactttattaattgccggtctatttattaattgccggtacttttattaattgccggttgcggcgcgccatgcttcatcagactct

SEQ ID NO: 11477 - DNA, 185 bp, Artificial Sequence; identical to SEQ ID NO: 11476
  Synthetic polynucleotide

SEQ ID NO: 11478 - DNA, 191 bp, Artificial Sequence
  Synthetic polynucleotide
atcatctcaccttgcctcctgtactgcgcaagatgtctcctgcaggcaggtcaccgtgaccttagacaggtcaccgtgacctttcgcaggtcaccgtgaccttgaccaggtcaccgtgaccttctacaggtcaccgtgaccttactcaggtcaccgtgacctttgcggcgcgccatgcttcatcagactct

SEQ ID NO: 11479 - DNA, 191 bp, Artificial Sequence; identical to SEQ ID NO: 11478
  Synthetic polynucleotide

SEQ ID NO: 11480 - DNA, 164 bp, Artificial Sequence
  Synthetic polynucleotide
atcatctcaccttgcctcctgtgttggttgtcaggcgacctgcaggttggactttagattggacttttcgttggactttgacttggactttctattggactttactttggacttttgcttggactttgtattggactttggcgcgccatgcttcatcagactct

SEQ ID NO: 11481 - DNA, 164 bp, Artificial Sequence; identical to SEQ ID NO: 11480
  Synthetic polynucleotide

SEQ ID NO: 11482 - DNA, 197 bp, Artificial Sequence
  Synthetic polynucleotide
atcatctcaccttgcctcctggtcaccattaatctcgccctgcagggcgccccctggtggcagagcgccccctggtggctcggcgccccctggtggcgacgcgccccctggtggcctagcgccccctggtggcactgcgccccctggtggctgcgcgccccctggtggcgtaggcgcgccatgcttcatcagactct

SEQ ID NO: 11483 - DNA, 197 bp, Artificial Sequence; identical to SEQ ID NO: 11482
  Synthetic polynucleotide

SEQ ID NO: 11484 - DNA, 191 bp, Artificial Sequence
  Synthetic polynucleotide
atcatctcaccttgcctcctgtacagtaacgaaggtctcctgcaggtcaggtgatcaaccggtagatcaggtgatcaaccggttcgtcaggtgatcaaccggtgactcaggtgatcaaccggtctatcaggtgatcaaccggtacttcaggtgatcaaccggttgcggcgcgccatgcttcatcagactct

SEQ ID NO: 11485 - DNA, 191 bp, Artificial Sequence; identical to SEQ ID NO: 11484
  Synthetic polynucleotide

SEQ ID NO: 11486 - DNA, 190 bp, Artificial Sequence
  Synthetic polynucleotide
atcatctcaccttgcctcctggcgattgtagacctgcgcctgcaggccgctctgaccctgagaccgctctgaccctgtcgccgctctgaccctggacccgctctgaccctgctaccgctctgaccctgactccgctctgaccctgtgcccgctctgaccctggtaggcgcgccatgcttcatcagactct

SEQ ID NO: 11487 - DNA, 190 bp, Artificial Sequence; identical to SEQ ID NO: 11486
  Synthetic polynucleotide

SEQ ID NO: 11488 - DNA, 188 bp, Artificial Sequence
  Synthetic polynucleotide
atcatctcaccttgcctcctggccgtacacctctagagcctgcaggcgccaggtgcagagacgccaggtgcagtcgcgccaggtgcaggaccgccaggtgcagctacgccaggtgcagactcgccaggtgcagtgccgccaggtgcaggtacgccaggtgcagggcgcgccatgcttcatcagactct

SEQ ID NO: 11489 - DNA, 188 bp, Artificial Sequence; identical to SEQ ID NO: 11488
  Synthetic polynucleotide

SEQ ID NO: 11490 - DNA, 172 bp, Artificial Sequence
  Synthetic polynucleotide
atcatctcaccttgcctcctgctggtgggcagatcgaacctgcaggttccgggtcaagattccgggtcatcgttccgggtcagacttccgggtcactattccgggtcaactttccgggtcatgcttccgggtcagtattccgggtcaggcgcgccatgcttcatcagactct

SEQ ID NO: 11491 - DNA, 172 bp, Artificial Sequence; identical to SEQ ID NO: 11490
  Synthetic polynucleotide

SEQ ID NO: 11492 - DNA, 156 bp, Artificial Sequence
  Synthetic polynucleotide
atcatctcaccttgcctcctgtacccaatagtcgagaacctgcagggtcattaaagagtcattaatcggtcattaagacgtcattaactagtcattaaactgtcattaatgcgtcattaagtagtcattaaggcgcgccatgcttcatcagactct

SEQ ID NO: 11493 - DNA, 156 bp, Artificial Sequence; identical to SEQ ID NO: 11492
  Synthetic polynucleotide

SEQ ID NO: 11494 - DNA, 148 bp, Artificial Sequence
  Synthetic polynucleotide
atcatctcaccttgcctcctgaaacgaagagcgtatctcctgcaggccgctaaagaccgctaatcgccgctaagacccgctaactaccgctaaactccgctaatgcccgctaagtaccgctaaggcgcgccatgcttcatcagactct

SEQ ID NO: 11495 - DNA, 148 bp, Artificial Sequence; identical to SEQ ID NO: 11494
  Synthetic polynucleotide

SEQ ID NO: 11496 - DNA, 180 bp, Artificial Sequence
  Synthetic polynucleotide
atcatctcaccttgcctcctgacgtcatagtaacttcacctgcagggtcccttgggaagagtcccttgggatcggtcccttgggagacgtcccttgggactagtcccttgggaactgtcccttgggatgcgtcccttgggagtagtcccttgggaggcgcgccatgcttcatcagactct

SEQ ID NO: 11497 - DNA, 180 bp, Artificial Sequence; identical to SEQ ID NO: 11496
  Synthetic polynucleotide

SEQ ID NO: 11498 - DNA, 197 bp, Artificial Sequence
  Synthetic polynucleotide
atcatctcaccttgcctcctggttgcctcattgacgtccctgcaggtaattcaatgaagtgagataattcaatgaagtgtcgtaattcaatgaagtggactaattcaatgaagtgctataattcaatgaagtgacttaattcaatgaagtgtgctaattcaatgaagtggtaggcgcgccatgcttcatcagactct

SEQ ID NO: 11499 - DNA, 197 bp, Artificial Sequence; identical to SEQ ID NO: 11498
  Synthetic polynucleotide

SEQ ID NO: 11500 - DNA, 172 bp, Artificial Sequence
  Synthetic polynucleotide
atcatctcaccttgcctcctgcaatgctttccgagatccctgcaggatgactcagcagaatgactcagctcgatgactcagcgacatgactcagcctaatgactcagcactatgactcagctgcatgactcagcgtaatgactcagcggcgcgccatgcttcatcagactct

SEQ ID NO: 11501 - DNA, 172 bp, Artificial Sequence; identical to SEQ ID NO: 11500
  Synthetic polynucleotide

SEQ ID NO: 11502 - DNA, 197 bp, Artificial Sequence
  Synthetic polynucleotide
atcatctcaccttgcctcctgcactagaacgagttatgcctgcaggaagtctgtggttagcagaaagtctgtggttagctcgaagtctgtggttagcgacaagtctgtggttagcctaaagtctgtggttagcactaagtctgtggttagctgcaagtctgtggttagcgtaggcgcgccatgcttcatcagactct

SEQ ID NO: 11503 - DNA, 197 bp, Artificial Sequence; identical to SEQ ID NO: 11502
  Synthetic polynucleotide

SEQ ID NO: 11504 - DNA, 188 bp, Artificial Sequence
  Synthetic polynucleotide
atcatctcaccttgcctcctggagagactagctagcagcctgcaggcagaggaaaaatagacagaggaaaaattcgcagaggaaaaatgaccagaggaaaaatctacagaggaaaaatactcagaggaaaaattgccagaggaaaaatgtacagaggaaaaatggcgcgccatgcttcatcagactct

SEQ ID NO: 11505 - DNA, 188 bp, Artificial Sequence; identical to SEQ ID NO: 11504
  Synthetic polynucleotide

SEQ ID NO: 11506 - DNA, 197 bp, Artificial Sequence
  Synthetic polynucleotide
atcatctcaccttgcctcctgcaacgtgccgtcattcacctgcaggggacaatgaagattgttgagaggacaatgaagattgttgtcgggacaatgaagattgttggacggacaatgaagattgttgctaggacaatgaagattgttgactggacaatgaagattgttgtgcggcgcgccatgcttcatcagactct

SEQ ID NO: 11507 - DNA, 197 bp, Artificial Sequence; identical to SEQ ID NO: 11506
  Synthetic polynucleotide

SEQ ID NO: 11508 - DNA, 191 bp, Artificial Sequence
  Synthetic polynucleotide
atcatctcaccttgcctcctgcggacgtttctaatggccctgcaggtgcactaattagcgcacagatgcactaattagcgcactcgtgcactaattagcgcacgactgcactaattagcgcacctatgcactaattagcgcacacttgcactaattagcgcactgcggcgcgccatgcttcatcagactct

SEQ ID NO: 11509 - DNA, 191 bp, Artificial Sequence; identical to SEQ ID NO: 11508
  Synthetic polynucleotide

SEQ ID NO: 11510 - DNA, 172 bp, Artificial Sequence
  Synthetic polynucleotide
atcatctcaccttgcctcctgtagggtagaaggtgcgtcctgcaggccatggcaacagaccatggcaactcgccatggcaacgacccatggcaacctaccatggcaacactccatggcaactgcccatggcaacgtaccatggcaacggcgcgccatgcttcatcagactct

SEQ ID NO: 11511 - DNA, 172 bp, Artificial Sequence; identical to SEQ ID NO: 11510
  Synthetic polynucleotide

SEQ ID NO: 11512 - DNA, 180 bp, Artificial Sequence
  Synthetic polynucleotide
atcatctcaccttgcctcctgaacgttgtatgtagggtcctgcaggtaatttaatcaagataatttaatcatcgtaatttaatcagactaatttaatcactataatttaatcaacttaatttaatcatgctaatttaatcagtataatttaatcaggcgcgccatgcttcatcagactct

SEQ ID NO: 11513 - DNA, 180 bp, Artificial Sequence; identical to SEQ ID NO: 11512
  Synthetic polynucleotide

SEQ ID NO: 11514 - DNA, 172 bp, Artificial Sequence
  Synthetic polynucleotide
atcatctcaccttgcctcctggcgatgcattcagtgaccctgcagggttaactagtagagttaactagttcggttaactagtgacgttaactagtctagttaactagtactgttaactagttgcgttaactagtgtagttaactagtggcgcgccatgcttcatcagactct

SEQ ID NO: 11515 - DNA, 172 bp, Artificial Sequence; identical to SEQ ID NO: 11514
  Synthetic polynucleotide

SEQ ID NO: 11516 - DNA, 191 bp, Artificial Sequence
  Synthetic polynucleotide
atcatctcaccttgcctcctgaaataccttacgggtgtcctgcaggcgcattaattaattaccagacgcattaattaattacctcgcgcattaattaattaccgaccgcattaattaattaccctacgcattaattaattaccactcgcattaattaattacctgcggcgcgccatgcttcatcagactct

SEQ ID NO: 11517 - DNA, 191 bp, Artificial Sequence; identical to SEQ ID NO: 11516
  Synthetic polynucleotide

SEQ ID NO: 11518 - DNA, 190 bp, Artificial Sequence
  Synthetic polynucleotide
atcatctcaccttgcctcctgattcaagggcatggactcctgcagggaaccggaagtggcagagaaccggaagtggctcggaaccggaagtggcgacgaaccggaagtggcctagaaccggaagtggcactgaaccggaagtggctgcgaaccggaagtggcgtaggcgcgccatgcttcatcagactct

SEQ ID NO: 11519 - DNA, 190 bp, Artificial Sequence; identical to SEQ ID NO: 11518
  Synthetic polynucleotide

SEQ ID NO: 11520 - DNA, 190 bp, Artificial Sequence
  Synthetic polynucleotide
atcatctcaccttgcctcctgagattggagatgacacgcctgcaggtttgaatattcataagatttgaatattcatatcgtttgaatattcatagactttgaatattcatactatttgaatattcataacttttgaatattcatatgctttgaatattcatagtaggcgcgccatgcttcatcagactct

SEQ ID NO: 11521 - DNA, 190 bp, Artificial Sequence; identical to SEQ ID NO: 11520
  Synthetic polynucleotide

SEQ ID NO: 11522 - DNA, 196 bp, Artificial Sequence
  Synthetic polynucleotide
atcatctcaccttgcctcctgtggccaattcagtaactcctgcaggctcatttcaaaaaagactcatttcaaaaatcgctcatttcaaaaagacctcatttcaaaaactactcatttcaaaaaactctcatttcaaaaatgcctcatttcaaaaagtactcatttcaaaaaggcgcgccatgcttcatcagactct

SEQ ID NO: 11523 - DNA, 196 bp, Artificial Sequence; identical to SEQ ID NO: 11522
  Synthetic polynucleotide

SEQ ID NO: 11524 - DNA, 191 bp, Artificial Sequence
  Synthetic polynucleotide
atcatctcaccttgcctcctgaagccctgttgctatgccctgcaggacatgtcatagacatgtagaacatgtcatagacatgttcgacatgtcatagacatgtgacacatgtcatagacatgtctaacatgtcatagacatgtactacatgtcatagacatgttgcggcgcgccatgcttcatcagactct

SEQ ID NO: 11525 - DNA, 191 bp, Artificial Sequence; identical to SEQ ID NO: 11524
  Synthetic polynucleotide

SEQ ID NO: 11526 - DNA, 180 bp, Artificial Sequence
  Synthetic polynucleotide
atcatctcaccttgcctcctgttggtctgggcattgttcctgcaggtcccaagggacagatcccaagggactcgtcccaagggacgactcccaagggacctatcccaagggacacttcccaagggactgctcccaagggacgtatcccaagggacggcgcgccatgcttcatcagactct

SEQ ID NO: 11527 - DNA, 180 bp, Artificial Sequence; identical to SEQ ID NO: 11526
  Synthetic polynucleotide

SEQ ID NO: 11528 - DNA, 197 bp, Artificial Sequence
  Synthetic polynucleotide
atcatctcaccttgcctcctgcccgttcttcaaatcctcctgcaggaaaacccggagcggaagaaaaacccggagcggatcgaaaacccggagcggagacaaaacccggagcggactaaaaacccggagcggaactaaaacccggagcggatgcaaaacccggagcggagtaggcgcgccatgcttcatcagactct

SEQ ID NO: 11529 - DNA, 197 bp, Artificial Sequence; identical to SEQ ID NO: 11528
  Synthetic polynucleotide

SEQ ID NO: 11530 - DNA, 172 bp, Artificial Sequence
  Synthetic polynucleotide
atcatctcaccttgcctcctgttagaagatttcgcggtcctgcaggcacagctggtagacacagctggttcgcacagctggtgaccacagctggtctacacagctggtactcacagctggttgccacagctggtgtacacagctggtggcgcgccatgcttcatcagactct

SEQ ID NO: 11531 - DNA, 172 bp, Artificial Sequence; identical to SEQ ID NO: 11530
  Synthetic polynucleotide

SEQ ID NO: 11532 - DNA, 185 bp, Artificial Sequence
  Synthetic polynucleotide
atcatctcaccttgcctcctggtcgcaaattggctgtgcctgcagggggcacgcaacccttaagagggcacgcaacccttatcggggcacgcaacccttagacgggcacgcaacccttactagggcacgcaacccttaactgggcacgcaacccttatgcggcgcgccatgcttcatcagactct

SEQ ID NO: 11533 - DNA, 185 bp, Artificial Sequence; identical to SEQ ID NO: 11532
  Synthetic polynucleotide

SEQ ID NO: 11534 - DNA, 172 bp, Artificial Sequence
  Synthetic polynucleotide
atcatctcaccttgcctcctgcggtatgttcggattgccctgcagggcggatagcgagagcggatagcgtcggcggatagcggacgcggatagcgctagcggatagcgactgcggatagcgtgcgcggatagcggtagcggatagcgggcgcgccatgcttcatcagactct

SEQ ID NO: 11535 - DNA, 172 bp, Artificial Sequence; identical to SEQ ID NO: 11534
  Synthetic polynucleotide

SEQ ID NO: 11536 - DNA, 164 bp, Artificial Sequence
  Synthetic polynucleotide
atcatctcaccttgcctcctgaggtgtttctacatacacctgcagggcctcaggcagagcctcaggctcggcctcaggcgacgcctcaggcctagcctcaggcactgcctcaggctgcgcctcaggcgtagcctcaggcggcgcgccatgcttcatcagactct

SEQ ID NO: 11537 - DNA, 164 bp, Artificial Sequence; identical to SEQ ID NO: 11536
  Synthetic polynucleotide

SEQ ID NO: 11538 - DNA, 196 bp, Artificial Sequence
  Synthetic polynucleotide
atcatctcaccttgcctcctggccggtacgaaatacggcctgcaggcgaaatcacggccagacgaaatcacggcctcgcgaaatcacggccgaccgaaatcacggccctacgaaatcacggccactcgaaatcacggcctgccgaaatcacggccgtacgaaatcacggccggcgcgccatgcttcatcagactct

SEQ ID NO: 11539 - DNA, 196 bp, Artificial Sequence; identical to SEQ ID NO: 11538
  Synthetic polynucleotide

SEQ ID NO: 11540 - DNA, 172 bp, Artificial Sequence
  Synthetic polynucleotide
atcatctcaccttgcctcctgacaccgcgtttagtgggcctgcaggaaaactacaaagaaaaactacaatcgaaaactacaagacaaaactacaactaaaaactacaaactaaaactacaatgcaaaactacaagtaaaaactacaaggcgcgccatgcttcatcagactct

SEQ ID NO: 11541 - DNA, 172 bp, Artificial Sequence; identical to SEQ ID NO: 11540
  Synthetic polynucleotide

SEQ ID NO: 11542 - DNA, 191 bp, Artificial Sequence
  Synthetic polynucleotide
atcatctcaccttgcctcctgggaagaacgtaagggtacctgcagggttcactaattagtttaagagttcactaattagtttatcggttcactaattagtttagacgttcactaattagtttactagttcactaattagtttaactgttcactaattagtttatgcggcgcgccatgcttcatcagactct

SEQ ID NO: 11543 - DNA, 191 bp, Artificial Sequence; identical to SEQ ID NO: 11542
  Synthetic polynucleotide

SEQ ID NO: 11544 - DNA, 180 bp, Artificial Sequence
  Synthetic polynucleotide
atcatctcaccttgcctcctgcaacatttcgcgcaagtcctgcagggcgccccctggagagcgccccctggtcggcgccccctgggacgcgccccctggctagcgccccctggactgcgccccctggtgcgcgccccctgggtagcgccccctggggcgcgccatgcttcatcagactct

SEQ ID NO: 11545 - DNA, 180 bp, Artificial Sequence; identical to SEQ ID NO: 11544
  Synthetic polynucleotide

SEQ ID NO: 11546 - DNA, 185 bp, Artificial Sequence
  Synthetic polynucleotide
atcatctcaccttgcctcctgaagacatgcggctgcgacctgcaggcaccagggggcgccagagacaccagggggcgccagtcgcaccagggggcgccaggaccaccagggggcgccagctacaccagggggcgccagactcaccagggggcgccagtgcggcgcgccatgcttcatcagactct

SEQ ID NO: 11547 - DNA, 185 bp, Artificial Sequence; identical to SEQ ID NO: 11546
  Synthetic polynucleotide

SEQ ID NO: 11548 - DNA, 180 bp, Artificial Sequence
  Synthetic polynucleotide
atcatctcaccttgcctcctggtgccctgagagacatacctgcaggctgggtggtccagactgggtggtcctcgctgggtggtccgacctgggtggtccctactgggtggtccactctgggtggtcctgcctgggtggtccgtactgggtggtccggcgcgccatgcttcatcagactct

SEQ ID NO: 11549 - DNA, 180 bp, Artificial Sequence; identical to SEQ ID NO: 11548
  Synthetic polynucleotide

SEQ ID NO: 11550 - DNA, 164 bp, Artificial Sequence
  Synthetic polynucleotide
atcatctcaccttgcctcctgttacgaggctgacctaacctgcaggttttaattgagattttaattgtcgttttaattggacttttaattgctattttaattgactttttaattgtgcttttaattggtattttaattgggcgcgccatgcttcatcagactct

SEQ ID NO: 11551 - DNA, 164 bp, Artificial Sequence; identical to SEQ ID NO: 11550
  Synthetic polynucleotide

SEQ ID NO: 11552 - DNA, 164 bp, Artificial Sequence
  Synthetic polynucleotide
atcatctcaccttgcctcctggcttaatcagtgttggacctgcaggttttaattaagattttaattatcgttttaattagacttttaattactattttaattaactttttaattatgcttttaattagtattttaattaggcgcgccatgcttcatcagactct

SEQ ID NO: 11553 - DNA, 164 bp, Artificial Sequence; identical to SEQ ID NO: 11552
  Synthetic polynucleotide

SEQ ID NO: 11554 - DNA, 172 bp, Artificial Sequence
  Synthetic polynucleotide
atcatctcaccttgcctcctgcgtaatccagcataaatcctgcaggatcaccccacagaatcaccccactcgatcaccccacgacatcaccccacctaatcaccccacactatcaccccactgcatcaccccacgtaatcaccccacggcgcgccatgcttcatcagactct

SEQ ID NO: 11555 - DNA, 172 bp, Artificial Sequence; identical to SEQ ID NO: 11554
  Synthetic polynucleotide

SEQ ID NO: 11556 - DNA, 191 bp, Artificial Sequence
  Synthetic polynucleotide
atcatctcaccttgcctcctgagcaggaccattggtttcctgcagggaaaattaattacttcgagagaaaattaattacttcgtcggaaaattaattacttcggacgaaaattaattacttcgctagaaaattaattacttcgactgaaaattaattacttcgtgcggcgcgccatgcttcatcagactct

SEQ ID NO: 11557 - DNA, 191 bp, Artificial Sequence; identical to SEQ ID NO: 11556
  Synthetic polynucleotide

SEQ ID NO: 11558 - DNA, 172 bp, Artificial Sequence
  Synthetic polynucleotide
atcatctcaccttgcctcctggggtcctactttctgatcctgcagggcgcgccaatagagcgcgccaattcggcgcgccaatgacgcgcgccaatctagcgcgccaatactgcgcgccaattgcgcgcgccaatgtagcgcgccaatggcgcgccatgcttcatcagactct

SEQ ID NO: 11559 - DNA, 172 bp, Artificial Sequence; identical to SEQ ID NO: 11558
  Synthetic polynucleotide

SEQ ID NO: 11560 - DNA, 196 bp, Artificial Sequence
  Synthetic polynucleotide
atcatctcaccttgcctcctgattagccagtgaaatggcctgcaggaccactagatggcactattgcaagaaccactagatggcactattgcatcgaccactagatggcactattgcagacaccactagatggcactattgcactaaccactagatggcactattgcaactggcgcgccatgcttcatcagactct

SEQ ID NO: 11561 - DNA, 196 bp, Artificial Sequence; identical to SEQ ID NO: 11560
  Synthetic polynucleotide

SEQ ID NO: 11562 - DNA, 191 bp, Artificial Sequence
  Synthetic polynucleotide
atcatctcaccttgcctcctgaatgaacgaggacaacacctgcaggtacactaattagtggcaagatacactaattagtggcatcgtacactaattagtggcagactacactaattagtggcactatacactaattagtggcaacttacactaattagtggcatgcggcgcgccatgcttcatcagactct

SEQ ID NO: 11563 - DNA, 191 bp, Artificial Sequence; identical to SEQ ID NO: 11562
  Synthetic polynucleotide

SEQ ID NO: 11564 - DNA, 197 bp, Artificial Sequence
  Synthetic polynucleotide
atcatctcaccttgcctcctgacgttagtgtcctgtatcctgcagggactacaattcccagagagactacaattcccagtcggactacaattcccaggacgactacaattcccagctagactacaattcccagactgactacaattcccagtgcgactacaattcccaggtaggcgcgccatgcttcatcagactct

SEQ ID NO: 11565 - DNA, 197 bp, Artificial Sequence; identical to SEQ ID NO: 11564
  Synthetic polynucleotide

SEQ ID NO: 11566 - DNA, 172 bp, Artificial Sequence
  Synthetic polynucleotide
atcatctcaccttgcctcctgctggtggttattaatcgcctgcaggagcacgtgacagaagcacgtgactcgagcacgtgacgacagcacgtgacctaagcacgtgacactagcacgtgactgcagcacgtgacgtaagcacgtgacggcgcgccatgcttcatcagactct

SEQ ID NO: 11567 - DNA, 172 bp, Artificial Sequence; identical to SEQ ID NO: 11566
  Synthetic polynucleotide

SEQ ID NO: 11568 - DNA, 156 bp, Artificial Sequence
  Synthetic polynucleotide
atcatctcaccttgcctcctgcgtcagggtctcgctatcctgcaggccctccccagaccctcccctcgccctccccgacccctccccctaccctccccactccctcccctgcccctccccgtaccctccccggcgcgccatgcttcatcagactct

SEQ ID NO: 11569 - DNA, 156 bp, Artificial Sequence; identical to SEQ ID NO: 11568
  Synthetic polynucleotide

SEQ ID NO: 11570 - DNA, 164 bp, Artificial Sequence
  Synthetic polynucleotide
atcatctcaccttgcctcctgttacccgcccaatgtatcctgcaggatttaattaagaatttaattatcgatttaattagacatttaattactaatttaattaactatttaattatgcatttaattagtaatttaattaggcgcgccatgcttcatcagactct

SEQ ID NO: 11571 - DNA, 164 bp, Artificial Sequence; identical to SEQ ID NO: 11570
  Synthetic polynucleotide

SEQ ID NO: 11572 - DNA, 188 bp, Artificial Sequence
  Synthetic polynucleotide
atcatctcaccttgcctcctgtgctcaaactcctcagacctgcaggtttcccgccaaaagatttcccgccaaatcgtttcccgccaaagactttcccgccaaactatttcccgccaaaacttttcccgccaaatgctttcccgccaaagtatttcccgccaaaggcgcgccatgcttcatcagactct

SEQ ID NO: 11573 - DNA, 188 bp, Artificial Sequence; identical to SEQ ID NO: 11572
  Synthetic polynucleotide

SEQ ID NO: 11574 - DNA, 185 bp, Artificial Sequence
  Synthetic polynucleotide
atcatctcaccttgcctcctgttaatcccggcgatggacctgcaggcagcattaattagtagagacagcattaattagtagtcgcagcattaattagtaggaccagcattaattagtagctacagcattaattagtagactcagcattaattagtagtgcggcgcgccatgcttcatcagactct

SEQ ID NO: 11575 - DNA, 185 bp, Artificial Sequence; identical to SEQ ID NO: 11574
  Synthetic polynucleotide

SEQ ID NO: 11576 - DNA, 180 bp, Artificial Sequence
  Synthetic polynucleotide
atcatctcaccttgcctcctgggcccgaagtaaaccctcctgcaggaaccacttaagagaaaccacttaagtcgaaccacttaaggacaaccacttaagctaaaccacttaagactaaccacttaagtgcaaccacttaaggtaaaccacttaagggcgcgccatgcttcatcagactct

SEQ ID NO: 11577 - DNA, 180 bp, Artificial Sequence; identical to SEQ ID NO: 11576
  Synthetic polynucleotide

SEQ ID NO: 11578 - DNA, 185 bp, Artificial Sequence
  Synthetic polynucleotide
atcatctcaccttgcctcctgtgtatcaaccgctagaccctgcaggctgtggggggtcgataagactgtggggggtcgatatcgctgtggggggtcgatagacctgtggggggtcgatactactgtggggggtcgataactctgtggggggtcgatatgcggcgcgccatgcttcatcagactct

SEQ ID NO: 11579 - DNA, 185 bp, Artificial Sequence; identical to SEQ ID NO: 11578
  Synthetic polynucleotide

SEQ ID NO: 11580 - DNA, 172 bp, Artificial Sequence
  Synthetic polynucleotide
atcatctcaccttgcctcctgtgtgtccacgggtgtaacctgcaggacccggaaatagaacccggaaattcgacccggaaatgacacccggaaatctaacccggaaatactacccggaaattgcacccggaaatgtaacccggaaatggcgcgccatgcttcatcagactct

SEQ ID NO: 11581 - DNA, 172 bp, Artificial Sequence; identical to SEQ ID NO: 11580
  Synthetic polynucleotide

SEQ ID NO: 11582 - DNA, 191 bp, Artificial Sequence
  Synthetic polynucleotide
atcatctcaccttgcctcctggaagaggatacagtaaacctgcaggctgatcgaaaccaaagtagactgatcgaaaccaaagttcgctgatcgaaaccaaagtgacctgatcgaaaccaaagtctactgatcgaaaccaaagtactctgatcgaaaccaaagttgcggcgcgccatgcttcatcagactct

SEQ ID NO: 11583 - DNA, 191 bp, Artificial Sequence; identical to SEQ ID NO: 11582
  Synthetic polynucleotide

SEQ ID NO: 11584 - DNA, 140 bp, Artificial Sequence
  Synthetic polynucleotide
atcatctcaccttgcctcctgcactagtagtcactcgacctgcaggggaatgagaggaatgtcgggaatggacggaatgctaggaatgactggaatgtgcggaatggtaggaatgggcgcgccatgcttcatcagactct

SEQ ID NO: 11585 - DNA, 140 bp, Artificial Sequence; identical to SEQ ID NO: 11584
  Synthetic polynucleotide

SEQ ID NO: 11586 - DNA, 197 bp, Artificial Sequence
  Synthetic polynucleotide
atcatctcaccttgcctcctgcctgaactcttgaacatcctgcaggcatgtcgggacatgcagacatgtcgggacatgctcgcatgtcgggacatgcgaccatgtcgggacatgcctacatgtcgggacatgcactcatgtcgggacatgctgccatgtcgggacatgcgtaggcgcgccatgcttcatcagactct

SEQ ID NO: 11587 - DNA, 197 bp, Artificial Sequence; identical to SEQ ID NO: 11586
  Synthetic polynucleotide

SEQ ID NO: 11588 - DNA, 197 bp, Artificial Sequence
  Synthetic polynucleotide
atcatctcaccttgcctcctgcaagtttaacgacgtaccctgcaggtgctaaaaatagcaaagatgctaaaaatagcaatcgtgctaaaaatagcaagactgctaaaaatagcaactatgctaaaaatagcaaacttgctaaaaatagcaatgctgctaaaaatagcaagtaggcgcgccatgcttcatcagactct

SEQ ID NO: 11589 - DNA, 197 bp, Artificial Sequence; identical to SEQ ID NO: 11588
  Synthetic polynucleotide

SEQ ID NO: 11590 - DNA, 172 bp, Artificial Sequence
  Synthetic polynucleotide
atcatctcaccttgcctcctgaagaccatctatacggccctgcagggttaatccgcagagttaatccgctcggttaatccgcgacgttaatccgcctagttaatccgcactgttaatccgctgcgttaatccgcgtagttaatccgcggcgcgccatgcttcatcagactct

SEQ ID NO: 11591 - DNA, 172 bp, Artificial Sequence; identical to SEQ ID NO: 11590
  Synthetic polynucleotide

SEQ ID NO: 11592 - DNA, 172 bp, Artificial Sequence
  Synthetic polynucleotide
atcatctcaccttgcctcctgggactcacctttatacgcctgcaggtcttatctctagatcttatctcttcgtcttatctctgactcttatctctctatcttatctctacttcttatctcttgctcttatctctgtatcttatctctggcgcgccatgcttcatcagactct

SEQ ID NO: 11593 - DNA, 172 bp, Artificial Sequence; identical to SEQ ID NO: 11592
  Synthetic polynucleotide

SEQ ID NO: 11594 - DNA, 188 bp, Artificial Sequence
  Synthetic polynucleotide
atcatctcaccttgcctcctgggtcccaggagagcttacctgcaggttgtgtttttttagattgtgttttttttcgttgtgtttttttgacttgtgtttttttctattgtgtttttttactttgtgttttttttgcttgtgtttttttgtattgtgtttttttggcgcgccatgcttcatcagactct

SEQ ID NO: 11595 - DNA, 188 bp, Artificial Sequence; identical to SEQ ID NO: 11594
  Synthetic polynucleotide

SEQ ID NO: 11596 - DNA, 197 bp, Artificial Sequence
  Synthetic polynucleotide
atcatctcaccttgcctcctgttacatgagatgaagctcctgcaggggaaggaaggaaggaaggagaggaaggaaggaaggaaggtcgggaaggaaggaaggaagggacggaaggaaggaaggaaggctaggaaggaaggaaggaaggactggaaggaaggaaggaaggtgcggcgcgccatgcttcatcagactct

SEQ ID NO: 11597 - DNA, 197 bp, Artificial Sequence; identical to SEQ ID NO: 11596
  Synthetic polynucleotide

SEQ ID NO: 11598 - DNA, 196 bp, Artificial Sequence
  Synthetic polynucleotide
atcatctcaccttgcctcctgggtcatcccaattgttacctgcaggtgctgagtcagcaagatgctgagtcagcatcgtgctgagtcagcagactgctgagtcagcactatgctgagtcagcaacttgctgagtcagcatgctgctgagtcagcagtatgctgagtcagcaggcgcgccatgcttcatcagactct

SEQ ID NO: 11599 - DNA, 196 bp, Artificial Sequence; identical to SEQ ID NO: 11598
  Synthetic polynucleotide

SEQ ID NO: 11600 - DNA, 164 bp, Artificial Sequence
  Synthetic polynucleotide
atcatctcaccttgcctcctgttatgaggcctgctgtgcctgcaggtatcactttagatatcacttttcgtatcactttgactatcactttctatatcactttacttatcacttttgctatcactttgtatatcactttggcgcgccatgcttcatcagactct

SEQ ID NO: 11601 - DNA, 164 bp, Artificial Sequence; identical to SEQ ID NO: 11600
  Synthetic polynucleotide

SEQ ID NO: 11602 - DNA, 185 bp, Artificial Sequence
  Synthetic polynucleotide
atcatctcaccttgcctcctgaacacaatcacacgccgcctgcagggtatacttcttactgcagagtatacttcttactgctcggtatacttcttactgcgacgtatacttcttactgcctagtatacttcttactgcactgtatacttcttactgctgcggcgcgccatgcttcatcagactct

SEQ ID NO: 11603 - DNA, 185 bp, Artificial Sequence; identical to SEQ ID NO: 11602
  Synthetic polynucleotide

SEQ ID NO: 11604 - DNA, 156 bp, Artificial Sequence
  Synthetic polynucleotide
atcatctcaccttgcctcctggccctatcttgtctattcctgcaggaaaggcgcagaaaaggcgctcgaaaggcgcgacaaaggcgcctaaaaggcgcactaaaggcgctgcaaaggcgcgtaaaaggcgcggcgcgccatgcttcatcagactct

SEQ ID NO: 11605 - DNA, 156 bp, Artificial Sequence; identical to SEQ ID NO: 11604
  Synthetic polynucleotide

SEQ ID NO: 11606 - DNA, 156 bp, Artificial Sequence
  Synthetic polynucleotide
atcatctcaccttgcctcctgcctacgcgaggtgtagacctgcaggggctgaggagaggctgaggtcgggctgagggacggctgaggctaggctgaggactggctgaggtgcggctgagggtaggctgaggggcgcgccatgcttcatcagactct

SEQ ID NO: 11607 - DNA, 156 bp, Artificial Sequence; identical to SEQ ID NO: 11606
  Synthetic polynucleotide

SEQ ID NO: 11608 - DNA, 172 bp, Artificial Sequence
  Synthetic polynucleotide
atcatctcaccttgcctcctgatgctcaggaatgactgcctgcaggtgatgactcaagatgatgactcatcgtgatgactcagactgatgactcactatgatgactcaacttgatgactcatgctgatgactcagtatgatgactcaggcgcgccatgcttcatcagactct

SEQ ID NO: 11609 - DNA, 172 bp, Artificial Sequence; identical to SEQ ID NO: 11608
  Synthetic polynucleotide

SEQ ID NO: 11610 - DNA, 164 bp, Artificial Sequence
  Synthetic polynucleotide
atcatctcaccttgcctcctgtcgcggatttatgtcaccctgcagggcacgtgtcagagcacgtgtctcggcacgtgtcgacgcacgtgtcctagcacgtgtcactgcacgtgtctgcgcacgtgtcgtagcacgtgtcggcgcgccatgcttcatcagactct

SEQ ID NO: 11611 - DNA, 164 bp, Artificial Sequence; identical to SEQ ID NO: 11610
  Synthetic polynucleotide

SEQ ID NO: 11612 - DNA, 140 bp, Artificial Sequence
  Synthetic polynucleotide
atcatctcaccttgcctcctgagattggcgatcgacggcctgcagggtggatagagtggattcggtggatgacgtggatctagtggatactgtggattgcgtggatgtagtggatggcgcgccatgcttcatcagactct

SEQ ID NO: 11613 - DNA, 140 bp, Artificial Sequence; identical to SEQ ID NO: 11612
  Synthetic polynucleotide

SEQ ID NO: 11614 - DNA, 172 bp, Artificial Sequence
  Synthetic polynucleotide
atcatctcaccttgcctcctgtaagggcatcggtgttacctgcaggcgtcacgcgtagacgtcacgcgttcgcgtcacgcgtgaccgtcacgcgtctacgtcacgcgtactcgtcacgcgttgccgtcacgcgtgtacgtcacgcgtggcgcgccatgcttcatcagactct

SEQ ID NO: 11615 - DNA, 172 bp, Artificial Sequence; identical to SEQ ID NO: 11614
  Synthetic polynucleotide

SEQ ID NO: 11616 - DNA, 164 bp, Artificial Sequence
  Synthetic polynucleotide
atcatctcaccttgcctcctggtttccgtgacaagagccctgcaggcgcgccaaaagacgcgccaaatcgcgcgccaaagaccgcgccaaactacgcgccaaaactcgcgccaaatgccgcgccaaagtacgcgccaaaggcgcgccatgcttcatcagactct

SEQ ID NO: 11617 - DNA, 164 bp, Artificial Sequence; identical to SEQ ID NO: 11616
  Synthetic polynucleotide

SEQ ID NO: 11618 - DNA, 172 bp, Artificial Sequence
  Synthetic polynucleotide
atcatctcaccttgcctcctgaccgaaatctcaaggaacctgcaggaatattgacaagaaatattgacatcgaatattgacagacaatattgacactaaatattgacaactaatattgacatgcaatattgacagtaaatattgacaggcgcgccatgcttcatcagactct

SEQ ID NO: 11619 - DNA, 172 bp, Artificial Sequence; identical to SEQ ID NO: 11618
  Synthetic polynucleotide

SEQ ID NO: 11620 - DNA, 197 bp, Artificial Sequence
  Synthetic polynucleotide
atcatctcaccttgcctcctgcgacccacgaactaacacctgcaggctgaccgcagctggttctagactgaccgcagctggttcttcgctgaccgcagctggttctgacctgaccgcagctggttctctactgaccgcagctggttctactctgaccgcagctggttcttgcggcgcgccatgcttcatcagactct

SEQ ID NO: 11621 - DNA, 197 bp, Artificial Sequence; identical to SEQ ID NO: 11620
  Synthetic polynucleotide

SEQ ID NO: 11622 - DNA, 197 bp, Artificial Sequence
  Synthetic polynucleotide
atcatctcaccttgcctcctggtgatataagcgtgcgacctgcaggtgctgactcagcaaaagatgctgactcagcaaatcgtgctgactcagcaaagactgctgactcagcaaactatgctgactcagcaaaacttgctgactcagcaaatgctgctgactcagcaaagtaggcgcgccatgcttcatcagactct

SEQ ID NO: 11623 - DNA, 197 bp, Artificial Sequence; identical to SEQ ID NO: 11622
  Synthetic polynucleotide

SEQ ID NO: 11624 - DNA, 180 bp, Artificial Sequence
  Synthetic polynucleotide
atcatctcaccttgcctcctgttgggacctaactagggcctgcaggatgaccttgaaagaatgaccttgaatcgatgaccttgaagacatgaccttgaactaatgaccttgaaactatgaccttgaatgcatgaccttgaagtaatgaccttgaaggcgcgccatgcttcatcagactct

SEQ ID NO: 11625 - DNA, 180 bp, Artificial Sequence; identical to SEQ ID NO: 11624
  Synthetic polynucleotide

SEQ ID NO: 11626 - DNA, 172 bp, Artificial Sequence
  Synthetic polynucleotide
atcatctcaccttgcctcctggcatacgtcccgtaatacctgcaggttatgttaatagattatgttaattcgttatgttaatgacttatgttaatctattatgttaatactttatgttaattgcttatgttaatgtattatgttaatggcgcgccatgcttcatcagactct

SEQ ID NO: 11627 - DNA, 172 bp, Artificial Sequence; identical to SEQ ID NO: 11626
  Synthetic polynucleotide

SEQ ID NO: 11628 - DNA, 196 bp, Artificial Sequence
  Synthetic polynucleotide
atcatctcaccttgcctcctgagtctttcacgagcgaccctgcaggaaccaattaaaaaagaaaccaattaaaaatcgaaccaattaaaaagacaaccaattaaaaactaaaccaattaaaaaactaaccaattaaaaatgcaaccaattaaaaagtaaaccaattaaaaaggcgcgccatgcttcatcagactct

SEQ ID NO: 11629 - DNA, 196 bp, Artificial Sequence; identical to SEQ ID NO: 11628
  Synthetic polynucleotide

SEQ ID NO: 11630 - DNA, 180 bp, Artificial Sequence
  Synthetic polynucleotide
atcatctcaccttgcctcctgtcctgcatatcataaaccctgcagggatcaccccacagagatcaccccactcggatcaccccacgacgatcaccccacctagatcaccccacactgatcaccccactgcgatcaccccacgtagatcaccccacggcgcgccatgcttcatcagactct

SEQ ID NO: 11631 - DNA, 180 bp, Artificial Sequence; identical to SEQ ID NO: 11630
  Synthetic polynucleotide

SEQ ID NO: 11632 - DNA, 180 bp, Artificial Sequence
  Synthetic polynucleotide
atcatctcaccttgcctcctgccacgcatcaggagagacctgcaggcggcacctgccagacggcacctgcctcgcggcacctgccgaccggcacctgccctacggcacctgccactcggcacctgcctgccggcacctgccgtacggcacctgccggcgcgccatgcttcatcagactct

SEQ ID NO: 11633 - DNA, 180 bp, Artificial Sequence; identical to SEQ ID NO: 11632
  Synthetic polynucleotide

SEQ ID NO: 11634 - DNA, 180 bp, Artificial Sequence
  Synthetic polynucleotide
atcatctcaccttgcctcctgagggcttgagcgctaatcctgcaggctgggtggtctagactgggtggtcttcgctgggtggtctgacctgggtggtctctactgggtggtctactctgggtggtcttgcctgggtggtctgtactgggtggtctggcgcgccatgcttcatcagactct

SEQ ID NO: 11635 - DNA, 180 bp, Artificial Sequence; identical to SEQ ID NO: 11634
  Synthetic polynucleotide

SEQ ID NO: 11636 - DNA, 172 bp, Artificial Sequence
  Synthetic polynucleotide
atcatctcaccttgcctcctgtgaaatggttgggtggacctgcaggtgccccccttagatgcccccctttcgtgccccccttgactgccccccttctatgccccccttacttgcccccctttgctgccccccttgtatgccccccttggcgcgccatgcttcatcagactct

SEQ ID NO: 11637 - DNA, 172 bp, Artificial Sequence; identical to SEQ ID NO: 11636
  Synthetic polynucleotide

SEQ ID NO: 11638 - DNA, 180 bp, Artificial Sequence
  Synthetic polynucleotide
atcatctcaccttgcctcctgagaacctgagtttccgccctgcaggccatatggtacagaccatatggtactcgccatatggtacgacccatatggtacctaccatatggtacactccatatggtactgcccatatggtacgtaccatatggtacggcgcgccatgcttcatcagactct

SEQ ID NO: 11639 - DNA, 180 bp, Artificial Sequence; identical to SEQ ID NO: 11638
  Synthetic polynucleotide

SEQ ID NO: 11640 - DNA, 156 bp, Artificial Sequence
  Synthetic polynucleotide
atcatctcaccttgcctcctgaccctaactccttgtatcctgcaggtgacctttagatgaccttttcgtgacctttgactgacctttctatgacctttacttgaccttttgctgacctttgtatgacctttggcgcgccatgcttcatcagactct

SEQ ID NO: 11641 - DNA, 156 bp, Artificial Sequence; identical to SEQ ID NO: 11640
  Synthetic polynucleotide

SEQ ID NO: 11642 - DNA, 172 bp, Artificial Sequence
  Synthetic polynucleotide
atcatctcaccttgcctcctgcccacactcccttagtacctgcaggtacaattcccagatacaattccctcgtacaattcccgactacaattcccctatacaattcccacttacaattccctgctacaattcccgtatacaattcccggcgcgccatgcttcatcagactct

SEQ ID NO: 11643 - DNA, 172 bp, Artificial Sequence; identical to SEQ ID NO: 11642
  Synthetic polynucleotide

SEQ ID NO: 11644 - DNA, 172 bp, Artificial Sequence
  Synthetic polynucleotide
atcatctcaccttgcctcctggcttgagggacactcaacctgcaggttaattaattagattaattaatttcgttaattaattgacttaattaattctattaattaattactttaattaatttgcttaattaattgtattaattaattggcgcgccatgcttcatcagactct

SEQ ID NO: 11645 - DNA, 172 bp, Artificial Sequence; identical to SEQ ID NO: 11644
  Synthetic polynucleotide

SEQ ID NO: 11646 - DNA, 188 bp, Artificial Sequence
  Synthetic polynucleotide
atcatctcaccttgcctcctggtctatccagccgacgtcctgcaggtttaagtggtttagatttaagtggttttcgtttaagtggtttgactttaagtggtttctatttaagtggtttacttttaagtggttttgctttaagtggtttgtatttaagtggtttggcgcgccatgcttcatcagactct

SEQ ID NO: 11647 - DNA, 188 bp, Artificial Sequence; identical to SEQ ID NO: 11646
  Synthetic polynucleotide

SEQ ID NO: 11648 - DNA, 191 bp, Artificial Sequence
  Synthetic polynucleotide
atcatctcaccttgcctcctgcagggtcaccgaatttgcctgcaggctcctcccctccctcctccccagactcctcccctccctcctcccctcgctcctcccctccctcctccccgacctcctcccctccctcctccccctactcctcccctccctcctccccactggcgcgccatgcttcatcagactct

SEQ ID NO: 11649 - DNA, 191 bp, Artificial Sequence; identical to SEQ ID NO: 11648
  Synthetic polynucleotide

SEQ ID NO: 11650 - DNA, 190 bp, Artificial Sequence
  Synthetic polynucleotide
atcatctcaccttgcctcctgttcctggtgaaccaactcctgcaggtgattttgcaatatagatgattttgcaatattcgtgattttgcaatatgactgattttgcaatatctatgattttgcaatatacttgattttgcaatattgctgattttgcaatatgtaggcgcgccatgcttcatcagactct

SEQ ID NO: 11651 - DNA, 190 bp, Artificial Sequence; identical to SEQ ID NO: 11650
  Synthetic polynucleotide

SEQ ID NO: 11652 - DNA, 179 bp, Artificial Sequence
  Synthetic polynucleotide
atcatctcaccttgcctcctgctacatctagatgcgcgcctgcaggacggggcgcagggatttgttgcccagaacggggcgcagggatttgttgccctcgacggggcgcagggatttgttgcccgacacggggcgcagggatttgttgcccctaggcgcgccatgcttcatcagactct

SEQ ID NO: 11653 - DNA, 179 bp, Artificial Sequence; identical to SEQ ID NO: 11652
  Synthetic polynucleotide

SEQ ID NO: 11654 - DNA, 197 bp, Artificial Sequence
  Synthetic polynucleotide
atcatctcaccttgcctcctgctcgcttaaggcgcgatcctgcaggttgacctttgacctcagattgacctttgacctctcgttgacctttgacctcgacttgacctttgacctcctattgacctttgacctcactttgacctttgacctctgcttgacctttgacctcgtaggcgcgccatgcttcatcagactct

SEQ ID NO: 11655 - DNA, 197 bp, Artificial Sequence; identical to SEQ ID NO: 11654
  Synthetic polynucleotide

SEQ ID NO: 11656 - DNA, 164 bp, Artificial Sequence
  Synthetic polynucleotide
atcatctcaccttgcctcctgtcgctgagatactgcctcctgcaggttaatggccagattaatggcctcgttaatggccgacttaatggccctattaatggccactttaatggcctgcttaatggccgtattaatggccggcgcgccatgcttcatcagactct

SEQ ID NO: 11657 - DNA, 164 bp, Artificial Sequence; identical to SEQ ID NO: 11656
  Synthetic polynucleotide

SEQ ID NO: 11658 - DNA, 190 bp, Artificial Sequence
  Synthetic polynucleotide
atcatctcaccttgcctcctgaagcattctcatgcgtgcctgcaggtgatgacgtggcatagatgatgacgtggcattcgtgatgacgtggcatgactgatgacgtggcatctatgatgacgtggcatacttgatgacgtggcattgctgatgacgtggcatgtaggcgcgccatgcttcatcagactct

SEQ ID NO: 11659 - DNA, 190 bp, Artificial Sequence; identical to SEQ ID NO: 11658
  Synthetic polynucleotide

SEQ ID NO: 11660 - DNA, 164 bp, Artificial Sequence
  Synthetic polynucleotide
atcatctcaccttgcctcctgcaggagtgtagcgtcctcctgcagggttgtttacagagttgtttactcggttgtttacgacgttgtttacctagttgtttacactgttgtttactgcgttgtttacgtagttgtttacggcgcgccatgcttcatcagactct

SEQ ID NO: 11661 - DNA, 164 bp, Artificial Sequence; identical to SEQ ID NO: 11660
  Synthetic polynucleotide

SEQ ID NO: 11662 - DNA, 156 bp, Artificial Sequence
  Synthetic polynucleotide
atcatctcaccttgcctcctgtaacgtggacagcaatccctgcaggcaattagcagacaattagctcgcaattagcgaccaattagcctacaattagcactcaattagctgccaattagcgtacaattagcggcgcgccatgcttcatcagactct

SEQ ID NO: 11663 - DNA, 156 bp, Artificial Sequence; identical to SEQ ID NO: 11662
  Synthetic polynucleotide

SEQ ID NO: 11664 - DNA, 180 bp, Artificial Sequence
  Synthetic polynucleotide
atcatctcaccttgcctcctgatcgttaggtcggagaccctgcaggcaactggccctagacaactggcccttcgcaactggccctgaccaactggccctctacaactggccctactcaactggcccttgccaactggccctgtacaactggccctggcgcgccatgcttcatcagactct

SEQ ID NO: 11665 - DNA, 180 bp, Artificial Sequence; identical to SEQ ID NO: 11664
  Synthetic polynucleotide

SEQ ID NO: 11666 - DNA, 190 bp, Artificial Sequence
  Synthetic polynucleotide
atcatctcaccttgcctcctgaggagaccaagttacgacctgcaggtattgcacaatcctagatattgcacaatccttcgtattgcacaatcctgactattgcacaatcctctatattgcacaatcctacttattgcacaatccttgctattgcacaatcctgtaggcgcgccatgcttcatcagactct

SEQ ID NO: 11667 - DNA, 190 bp, Artificial Sequence; identical to SEQ ID NO: 11666
  Synthetic polynucleotide

SEQ ID NO: 11668 - DNA, 172 bp, Artificial Sequence
  Synthetic polynucleotide
atcatctcaccttgcctcctgtacgcaatgacatacgacctgcaggccccgcccgcagaccccgcccgctcgccccgcccgcgacccccgcccgcctaccccgcccgcactccccgcccgctgcccccgcccgcgtaccccgcccgcggcgcgccatgcttcatcagactct

SEQ ID NO: 11669 - DNA, 172 bp, Artificial Sequence; identical to SEQ ID NO: 11668
  Synthetic polynucleotide

SEQ ID NO: 11670 - DNA, 190 bp, Artificial Sequence
  Synthetic polynucleotide
atcatctcaccttgcctcctgcacacctctaaagagagcctgcaggggctaattagcgaaagaggctaattagcgaatcgggctaattagcgaagacggctaattagcgaactaggctaattagcgaaactggctaattagcgaatgcggctaattagcgaagtaggcgcgccatgcttcatcagactct

SEQ ID NO: 11671 - DNA, 190 bp, Artificial Sequence; identical to SEQ ID NO: 11670
  Synthetic polynucleotide

SEQ ID NO: 11672 - DNA, 148 bp, Artificial Sequence
  Synthetic polynucleotide
atcatctcaccttgcctcctgtacaaagccttaccctccctgcaggataaacaagaataaacatcgataaacagacataaacactaataaacaactataaacatgcataaacagtaataaacaggcgcgccatgcttcatcagactct

SEQ ID NO: 11673 - DNA, 148 bp, Artificial Sequence; identical to SEQ ID NO: 11672
  Synthetic polynucleotide

SEQ ID NO: 11674 - DNA, 172 bp, Artificial Sequence
  Synthetic polynucleotide
atcatctcaccttgcctcctgtaatatccggttcctctcctgcaggtggttgctacagatggttgctactcgtggttgctacgactggttgctacctatggttgctacacttggttgctactgctggttgctacgtatggttgctacggcgcgccatgcttcatcagactct

SEQ ID NO: 11675 - DNA, 172 bp, Artificial Sequence; identical to SEQ ID NO: 11674
  Synthetic polynucleotide

SEQ ID NO: 11676 - DNA, 172 bp, Artificial Sequence
  Synthetic polynucleotide
atcatctcaccttgcctcctgattaaggatcagcatgacctgcaggccccgcggccagaccccgcggcctcgccccgcggccgacccccgcggccctaccccgcggccactccccgcggcctgcccccgcggccgtaccccgcggccggcgcgccatgcttcatcagactct

SEQ ID NO: 11677 - DNA, 172 bp, Artificial Sequence; identical to SEQ ID NO: 11676
  Synthetic polynucleotide

SEQ ID NO: 11678 - DNA, 197 bp, Artificial Sequence
  Synthetic polynucleotide
atcatctcaccttgcctcctgaccgtcacgtagataaacctgcaggagtacatgatgttctagaagtacatgatgttcttcgagtacatgatgttctgacagtacatgatgttctctaagtacatgatgttctactagtacatgatgttcttgcagtacatgatgttctgtaggcgcgccatgcttcatcagactct

SEQ ID NO: 11679 - DNA, 197 bp, Artificial Sequence; identical to SEQ ID NO: 11678
  Synthetic polynucleotide

SEQ ID NO: 11680 - DNA, 148 bp, Artificial Sequence
  Synthetic polynucleotide
atcatctcaccttgcctcctgtcaccctatggcgttcgcctgcaggtgacgtaagatgacgtatcgtgacgtagactgacgtactatgacgtaacttgacgtatgctgacgtagtatgacgtaggcgcgccatgcttcatcagactct

SEQ ID NO: 11681 - DNA, 148 bp, Artificial Sequence; identical to SEQ ID NO: 11680
  Synthetic polynucleotide

SEQ ID NO: 11682 - DNA, 172 bp, Artificial Sequence
  Synthetic polynucleotide
atcatctcaccttgcctcctgagtaaccctgattgaaacctgcaggcacttcctctagacacttcctcttcgcacttcctctgaccacttcctctctacacttcctctactcacttcctcttgccacttcctctgtacacttcctctggcgcgccatgcttcatcagactct

SEQ ID NO: 11683 - DNA, 172 bp, Artificial Sequence; identical to SEQ ID NO: 11682
  Synthetic polynucleotide

SEQ ID NO: 11684 - DNA, 197 bp, Artificial Sequence
  Synthetic polynucleotide
atcatctcaccttgcctcctgcgaatcgcagagtttcccctgcaggtcttccgcttccttcagatcttccgcttccttctcgtcttccgcttccttcgactcttccgcttccttcctatcttccgcttccttcacttcttccgcttccttctgctcttccgcttccttcgtaggcgcgccatgcttcatcagactct

SEQ ID NO: 11685 - DNA, 197 bp, Artificial Sequence; identical to SEQ ID NO: 11684
  Synthetic polynucleotide

SEQ ID NO: 11686 - DNA, 191 bp, Artificial Sequence
  Synthetic polynucleotide
atcatctcaccttgcctcctggctgtctatagttcttccctgcaggggccaccagagggtggcagaggccaccagagggtggctcgggccaccagagggtggcgacggccaccagagggtggcctaggccaccagagggtggcactggccaccagagggtggctgcggcgcgccatgcttcatcagactct

SEQ ID NO: 11687 - DNA, 191 bp, Artificial Sequence; identical to SEQ ID NO: 11686
  Synthetic polynucleotide

SEQ ID NO: 11688 - DNA, 197 bp, Artificial Sequence
  Synthetic polynucleotide
atcatctcaccttgcctcctgatgccatgggattacagcctgcaggttgacctttgaccttagattgacctttgacctttcgttgacctttgaccttgacttgacctttgaccttctattgacctttgaccttactttgacctttgacctttgcttgacctttgaccttgtaggcgcgccatgcttcatcagactct

SEQ ID NO: 11689 - DNA, 197 bp, Artificial Sequence; identical to SEQ ID NO: 11688
  Synthetic polynucleotide

SEQ ID NO: 11690 - DNA, 197 bp, Artificial Sequence
  Synthetic polynucleotide
atcatctcaccttgcctcctggacgcgtacgctatggtcctgcaggtttgctgagtcagcaagatttgctgagtcagcatcgtttgctgagtcagcagactttgctgagtcagcactatttgctgagtcagcaacttttgctgagtcagcatgctttgctgagtcagcagtaggcgcgccatgcttcatcagactct

SEQ ID NO: 11691 - DNA, 197 bp, Artificial Sequence; identical to SEQ ID NO: 11690
  Synthetic polynucleotide

SEQ ID NO: 11692 - DNA, 164 bp, Artificial Sequence
  Synthetic polynucleotide
atcatctcaccttgcctcctgtataatcgaggaagggacctgcaggggcaattatagaggcaattattcgggcaattatgacggcaattatctaggcaattatactggcaattattgcggcaattatgtaggcaattatggcgcgccatgcttcatcagactct

SEQ ID NO: 11693 - DNA, 164 bp, Artificial Sequence; identical to SEQ ID NO: 11692
  Synthetic polynucleotide

SEQ ID NO: 11694 - DNA, 164 bp, Artificial Sequence
  Synthetic polynucleotide
atcatctcaccttgcctcctgagcaccgcgatcattgacctgcaggaataaacaaagaaataaacaatcgaataaacaagacaataaacaactaaataaacaaactaataaacaatgcaataaacaagtaaataaacaaggcgcgccatgcttcatcagactct

SEQ ID NO: 11695 - DNA, 164 bp, Artificial Sequence; identical to SEQ ID NO: 11694
  Synthetic polynucleotide

SEQ ID NO: 11696 - DNA, 156 bp, Artificial Sequence
  Synthetic polynucleotide
atcatctcaccttgcctcctgttggtgcatcgcggcatcctgcaggtaattaaaagataattaaatcgtaattaaagactaattaaactataattaaaacttaattaaatgctaattaaagtataattaaaggcgcgccatgcttcatcagactct

SEQ ID NO: 11697 - DNA, 156 bp, Artificial Sequence; identical to SEQ ID NO: 11696
  Synthetic polynucleotide

SEQ ID NO: 11698 - DNA, 191 bp, Artificial Sequence
  Synthetic polynucleotide
atcatctcaccttgcctcctgatgccaacacgcacggacctgcaggagaactaattagtggacagaagaactaattagtggactcgagaactaattagtggacgacagaactaattagtggacctaagaactaattagtggacactagaactaattagtggactgcggcgcgccatgcttcatcagactct

SEQ ID NO: 11699 - DNA, 191 bp, Artificial Sequence; identical to SEQ ID NO: 11698
  Synthetic polynucleotide

SEQ ID NO: 11700 - DNA, 197 bp, Artificial Sequence
  Synthetic polynucleotide
atcatctcaccttgcctcctggactcacaacagctaaacctgcaggccgggacagtctgttctcagaccgggacagtctgttctctcgccgggacagtctgttctcgacccgggacagtctgttctcctaccgggacagtctgttctcactccgggacagtctgttctctgcggcgcgccatgcttcatcagactct

SEQ ID NO: 11701 - DNA, 197 bp, Artificial Sequence; identical to SEQ ID NO: 11700
  Synthetic polynucleotide

SEQ ID NO: 11702 - DNA, 164 bp, Artificial Sequence
  Synthetic polynucleotide
atcatctcaccttgcctcctgcagaccgaccttgggttcctgcaggagtaacagtagaagtaacagttcgagtaacagtgacagtaacagtctaagtaacagtactagtaacagttgcagtaacagtgtaagtaacagtggcgcgccatgcttcatcagactct

SEQ ID NO: 11703 - DNA, 164 bp, Artificial Sequence; identical to SEQ ID NO: 11702
  Synthetic polynucleotide

SEQ ID NO: 11704 - DNA, 185 bp, Artificial Sequence
  Synthetic polynucleotide
atcatctcaccttgcctcctgctaaacagttcatacctcctgcagggtcttaattagtgcacagagtcttaattagtgcactcggtcttaattagtgcacgacgtcttaattagtgcacctagtcttaattagtgcacactgtcttaattagtgcactgcggcgcgccatgcttcatcagactct

SEQ ID NO: 11705 - DNA, 185 bp, Artificial Sequence; identical to SEQ ID NO: 11704
  Synthetic polynucleotide

SEQ ID NO: 11706 - DNA, 164 bp, Artificial Sequence
  Synthetic polynucleotide
atcatctcaccttgcctcctgccgatattagactgtcacctgcagggctaattagagagctaattagtcggctaattaggacgctaattagctagctaattagactgctaattagtgcgctaattaggtagctaattagggcgcgccatgcttcatcagactct

SEQ ID NO: 11707 - DNA, 164 bp, Artificial Sequence; identical to SEQ ID NO: 11706
  Synthetic polynucleotide

SEQ ID NO: 11708 - DNA, 164 bp, Artificial Sequence
  Synthetic polynucleotide
atcatctcaccttgcctcctgaacttcaccaatgcgagcctgcaggtcgtgctcaagatcgtgctcatcgtcgtgctcagactcgtgctcactatcgtgctcaacttcgtgctcatgctcgtgctcagtatcgtgctcaggcgcgccatgcttcatcagactct

SEQ ID NO: 11709 - DNA, 164 bp, Artificial Sequence; identical to SEQ ID NO: 11708
  Synthetic polynucleotide

SEQ ID NO: 11710 - DNA, 156 bp, Artificial Sequence
  Synthetic polynucleotide
atcatctcaccttgcctcctgagctcgggtgtgtaacacctgcaggtaattaacagataattaactcgtaattaacgactaattaacctataattaacacttaattaactgctaattaacgtataattaacggcgcgccatgcttcatcagactct

SEQ ID NO: 11711 - DNA, 156 bp, Artificial Sequence; identical to SEQ ID NO: 11710
  Synthetic polynucleotide

SEQ ID NO: 11712 - DNA, 156 bp, Artificial Sequence
  Synthetic polynucleotide
atcatctcaccttgcctcctggtcggcgatatccgatacctgcagggattgatgagagattgatgtcggattgatggacgattgatgctagattgatgactgattgatgtgcgattgatggtagattgatgggcgcgccatgcttcatcagactct

SEQ ID NO: 11713 - DNA, 156 bp, Artificial Sequence; identical to SEQ ID NO: 11712
  Synthetic polynucleotide

SEQ ID NO: 11714 - DNA, 197 bp, Artificial Sequence
  Synthetic polynucleotide
atcatctcaccttgcctcctgctgacagactttacccgcctgcaggcctttgttatgcaaaagacctttgttatgcaaatcgcctttgttatgcaaagaccctttgttatgcaaactacctttgttatgcaaaactcctttgttatgcaaatgccctttgttatgcaaagtaggcgcgccatgcttcatcagactct

SEQ ID NO: 11715 - DNA, 197 bp, Artificial Sequence; identical to SEQ ID NO: 11714
  Synthetic polynucleotide

SEQ ID NO: 11716 - DNA, 190 bp, Artificial Sequence
  Synthetic polynucleotide
atcatctcaccttgcctcctgttgaacggctcaagtagcctgcaggaagataagataacaagaaagataagataacatcgaagataagataacagacaagataagataacactaaagataagataacaactaagataagataacatgcaagataagataacagtaggcgcgccatgcttcatcagactct

SEQ ID NO: 11717 - DNA, 190 bp, Artificial Sequence; identical to SEQ ID NO: 11716
  Synthetic polynucleotide

SEQ ID NO: 11718 - DNA, 179 bp, Artificial Sequence
  Synthetic polynucleotide
atcatctcaccttgcctcctgtacctaggtaaccagtacctgcaggggccttttgttgtcaatcaaaacaagaggccttttgttgtcaatcaaaacatcgggccttttgttgtcaatcaaaacagacggccttttgttgtcaatcaaaacactaggcgcgccatgcttcatcagactct

SEQ ID NO: 11719 - DNA, 179 bp, Artificial Sequence; identical to SEQ ID NO: 11718
  Synthetic polynucleotide

SEQ ID NO: 11720 - DNA, 180 bp, Artificial Sequence
  Synthetic polynucleotide
atcatctcaccttgcctcctgtgcagtgattaagtttccctgcaggatgactcactcagaatgactcactctcgatgactcactcgacatgactcactcctaatgactcactcactatgactcactctgcatgactcactcgtaatgactcactcggcgcgccatgcttcatcagactct

SEQ ID NO: 11721 - DNA, 180 bp, Artificial Sequence; identical to SEQ ID NO: 11720
  Synthetic polynucleotide

SEQ ID NO: 11722 - DNA, 196 bp, Artificial Sequence
  Synthetic polynucleotide
atcatctcaccttgcctcctgcatcttgcgattgaaagcctgcaggttttcgcgcctttagattttcgcgccttttcgttttcgcgcctttgacttttcgcgcctttctattttcgcgcctttactttttcgcgccttttgcttttcgcgcctttgtattttcgcgcctttggcgcgccatgcttcatcagactct

SEQ ID NO: 11723 - DNA, 196 bp, Artificial Sequence; identical to SEQ ID NO: 11722
  Synthetic polynucleotide

SEQ ID NO: 11724 - DNA, 188 bp, Artificial Sequence
  Synthetic polynucleotide
atcatctcaccttgcctcctgctcgcctccaatggaaccctgcaggtcccacgtgtcaagatcccacgtgtcatcgtcccacgtgtcagactcccacgtgtcactatcccacgtgtcaacttcccacgtgtcatgctcccacgtgtcagtatcccacgtgtcaggcgcgccatgcttcatcagactct

SEQ ID NO: 11725 - DNA, 188 bp, Artificial Sequence; identical to SEQ ID NO: 11724
  Synthetic polynucleotide

SEQ ID NO: 11726 - DNA, 164 bp, Artificial Sequence
  Synthetic polynucleotide
atcatctcaccttgcctcctgtgtcgctaacttgaacacctgcaggggcaattaaagaggcaattaatcgggcaattaagacggcaattaactaggcaattaaactggcaattaatgcggcaattaagtaggcaattaaggcgcgccatgcttcatcagactct

SEQ ID NO: 11727 - DNA, 164 bp, Artificial Sequence; identical to SEQ ID NO: 11726
  Synthetic polynucleotide

SEQ ID NO: 11728 - DNA, 172 bp, Artificial Sequence
  Synthetic polynucleotide
atcatctcaccttgcctcctgaccgaaactacgccactcctgcaggcggcgcccgcagacggcgcccgctcgcggcgcccgcgaccggcgcccgcctacggcgcccgcactcggcgcccgctgccggcgcccgcgtacggcgcccgcggcgcgccatgcttcatcagactct

SEQ ID NO: 11729 - DNA, 172 bp, Artificial Sequence; identical to SEQ ID NO: 11728
  Synthetic polynucleotide

SEQ ID NO: 11730 - DNA, 172 bp, Artificial Sequence
  Synthetic polynucleotide
atcatctcaccttgcctcctgacgaaagtgtccgaccccctgcaggtcgcctgaggagatcgcctgaggtcgtcgcctgagggactcgcctgaggctatcgcctgaggacttcgcctgaggtgctcgcctgagggtatcgcctgaggggcgcgccatgcttcatcagactct

SEQ ID NO: 11731 - DNA, 172 bp, Artificial Sequence; identical to SEQ ID NO: 11730
  Synthetic polynucleotide

SEQ ID NO: 11732 - DNA, 156 bp, Artificial Sequence
  Synthetic polynucleotide
atcatctcaccttgcctcctggctcccttctaccaggtcctgcaggtaattaagagataattaagtcgtaattaaggactaattaagctataattaagacttaattaagtgctaattaaggtataattaagggcgcgccatgcttcatcagactct

SEQ ID NO: 11733 - DNA, 156 bp, Artificial Sequence; identical to SEQ ID NO: 11732
  Synthetic polynucleotide

SEQ ID NO: 11734 - DNA, 172 bp, Artificial Sequence
  Synthetic polynucleotide
atcatctcaccttgcctcctgacaagaatgttaagcagcctgcaggtgacctacttagatgacctactttcgtgacctacttgactgacctacttctatgacctacttacttgacctactttgctgacctacttgtatgacctacttggcgcgccatgcttcatcagactct

SEQ ID NO: 11735 - DNA, 172 bp, Artificial Sequence; identical to SEQ ID NO: 11734
  Synthetic polynucleotide

SEQ ID NO: 11736 - DNA, 172 bp, Artificial Sequence
  Synthetic polynucleotide
atcatctcaccttgcctcctgcaacatatttgtatcggcctgcaggaaagatgaatagaaaagatgaattcgaaagatgaatgacaaagatgaatctaaaagatgaatactaaagatgaattgcaaagatgaatgtaaaagatgaatggcgcgccatgcttcatcagactct

SEQ ID NO: 11737 - DNA, 172 bp, Artificial Sequence; identical to SEQ ID NO: 11736
  Synthetic polynucleotide

SEQ ID NO: 11738 - DNA, 190 bp, Artificial Sequence
  Synthetic polynucleotide
atcatctcaccttgcctcctgcatgtatatacccggtccctgcaggtgatgacgtggcacagatgatgacgtggcactcgtgatgacgtggcacgactgatgacgtggcacctatgatgacgtggcacacttgatgacgtggcactgctgatgacgtggcacgtaggcgcgccatgcttcatcagactct

SEQ ID NO: 11739 - DNA, 190 bp, Artificial Sequence; identical to SEQ ID NO: 11738
  Synthetic polynucleotide

SEQ ID NO: 11740 - DNA, 188 bp, Artificial Sequence
  Synthetic polynucleotide
atcatctcaccttgcctcctgggcgaatccatgtggtccctgcaggggtcgtaaaaatagaggtcgtaaaaattcgggtcgtaaaaatgacggtcgtaaaaatctaggtcgtaaaaatactggtcgtaaaaattgcggtcgtaaaaatgtaggtcgtaaaaatggcgcgccatgcttcatcagactct

SEQ ID NO: 11741 - DNA, 188 bp, Artificial Sequence; identical to SEQ ID NO: 11740
  Synthetic polynucleotide

SEQ ID NO: 11742 - DNA, 197 bp, Artificial Sequence
  Synthetic polynucleotide
atcatctcaccttgcctcctgtccatgattaagtcatgcctgcagggctgagtcagcaatttttagagctgagtcagcaattttttcggctgagtcagcaatttttgacgctgagtcagcaatttttctagctgagtcagcaatttttactgctgagtcagcaattttttgcggcgcgccatgcttcatcagactct

SEQ ID NO: 11743 - DNA, 197 bp, Artificial Sequence; identical to SEQ ID NO: 11742
  Synthetic polynucleotide

SEQ ID NO: 11744 - DNA, 172 bp, Artificial Sequence
  Synthetic polynucleotide
atcatctcaccttgcctcctgtaaccactttcgcctatcctgcaggagaggtcaatagaagaggtcaattcgagaggtcaatgacagaggtcaatctaagaggtcaatactagaggtcaattgcagaggtcaatgtaagaggtcaatggcgcgccatgcttcatcagactct

SEQ ID NO: 11745 - DNA, 172 bp, Artificial Sequence; identical to SEQ ID NO: 11744
  Synthetic polynucleotide

SEQ ID NO: 11746 - DNA, 156 bp, Artificial Sequence
  Synthetic polynucleotide
atcatctcaccttgcctcctgccaacagtagtactcgacctgcaggaaaggtcaagaaaaggtcatcgaaaggtcagacaaaggtcactaaaaggtcaactaaaggtcatgcaaaggtcagtaaaaggtcaggcgcgccatgcttcatcagactct

SEQ ID NO: 11747 - DNA, 156 bp, Artificial Sequence; identical to SEQ ID NO: 11746
  Synthetic polynucleotide

SEQ ID NO: 11748 - DNA, 197 bp, Artificial Sequence
  Synthetic polynucleotide
atcatctcaccttgcctcctgcctcacccgatggattccctgcaggtattgcatcatctttagatattgcatcatcttttcgtattgcatcatctttgactattgcatcatctttctatattgcatcatctttacttattgcatcatcttttgctattgcatcatctttgtaggcgcgccatgcttcatcagactct

SEQ ID NO: 11749 - DNA, 197 bp, Artificial Sequence; identical to SEQ ID NO: 11748
  Synthetic polynucleotide

SEQ ID NO: 11750 - DNA, 172 bp, Artificial Sequence
  Synthetic polynucleotide
atcatctcaccttgcctcctgatccctgagacattcttcctgcagggcttccggttagagcttccggtttcggcttccggttgacgcttccggttctagcttccggttactgcttccggtttgcgcttccggttgtagcttccggttggcgcgccatgcttcatcagactct

SEQ ID NO: 11751 - DNA, 172 bp, Artificial Sequence; identical to SEQ ID NO: 11750
  Synthetic polynucleotide

SEQ ID NO: 11752 - DNA, 197 bp, Artificial Sequence
  Synthetic polynucleotide
atcatctcaccttgcctcctggcattctctagtagaaacctgcaggatcaattgcagtgatagaatcaattgcagtgattcgatcaattgcagtgatgacatcaattgcagtgatctaatcaattgcagtgatactatcaattgcagtgattgcatcaattgcagtgatgtaggcgcgccatgcttcatcagactct

SEQ ID NO: 11753 - DNA, 197 bp, Artificial Sequence; identical to SEQ ID NO: 11752
  Synthetic polynucleotide

SEQ ID NO: 11754 - DNA, 156 bp, Artificial Sequence
  Synthetic polynucleotide
atcatctcaccttgcctcctgccgttgtcattaagaaccctgcaggtaattaatagataattaattcgtaattaatgactaattaatctataattaatacttaattaattgctaattaatgtataattaatggcgcgccatgcttcatcagactct

SEQ ID NO: 11755 - DNA, 156 bp, Artificial Sequence; identical to SEQ ID NO: 11754
  Synthetic polynucleotide

SEQ ID NO: 11756 - DNA, 190 bp, Artificial Sequence
  Synthetic polynucleotide
atcatctcaccttgcctcctgcacgactcgtgaaagcgcctgcaggtggcaccatgccaaagatggcaccatgccaatcgtggcaccatgccaagactggcaccatgccaactatggcaccatgccaaacttggcaccatgccaatgctggcaccatgccaagtaggcgcgccatgcttcatcagactct

SEQ ID NO: 11757 - DNA, 190 bp, Artificial Sequence; identical to SEQ ID NO: 11756
  Synthetic polynucleotide

SEQ ID NO: 11758 - DNA, 190 bp, Artificial Sequence
  Synthetic polynucleotide
atcatctcaccttgcctcctgatgcgaaacggatgcttcctgcaggaccggaaatccggtagaaccggaaatccggttcgaccggaaatccggtgacaccggaaatccggtctaaccggaaatccggtactaccggaaatccggttgcaccggaaatccggtgtaggcgcgccatgcttcatcagactct

SEQ ID NO: 11759 - DNA, 190 bp, Artificial Sequence; identical to SEQ ID NO: 11758
  Synthetic polynucleotide

SEQ ID NO: 11760 - DNA, 197 bp, Artificial Sequence
  Synthetic polynucleotide
atcatctcaccttgcctcctgatggctcagtgttaggtcctgcaggtgaccttttgaccctagatgaccttttgacccttcgtgaccttttgaccctgactgaccttttgaccctctatgaccttttgaccctacttgaccttttgacccttgctgaccttttgaccctgtaggcgcgccatgcttcatcagactct

SEQ ID NO: 11761 - DNA, 197 bp, Artificial Sequence; identical to SEQ ID NO: 11760
  Synthetic polynucleotide

SEQ ID NO: 11762 - DNA, 197 bp, Artificial Sequence
  Synthetic polynucleotide
atcatctcaccttgcctcctgctgagcccttaggcctacctgcaggaaggtcatctaaaggtcaagaaaggtcatctaaaggtcatcgaaggtcatctaaaggtcagacaaggtcatctaaaggtcactaaaggtcatctaaaggtcaactaaggtcatctaaaggtcatgcggcgcgccatgcttcatcagactct

SEQ ID NO: 11763 - DNA, 197 bp, Artificial Sequence; identical to SEQ ID NO: 11762
  Synthetic polynucleotide

SEQ ID NO: 11764 - DNA, 185 bp, Artificial Sequence
  Synthetic polynucleotide
atcatctcaccttgcctcctggtagtttgctcaggtaacctgcaggatcactgcacattgatagaatcactgcacattgattcgatcactgcacattgatgacatcactgcacattgatctaatcactgcacattgatactatcactgcacattgattgcggcgcgccatgcttcatcagactct

SEQ ID NO: 11765 - DNA, 185 bp, Artificial Sequence; identical to SEQ ID NO: 11764
  Synthetic polynucleotide

SEQ ID NO: 11766 - DNA, 172 bp, Artificial Sequence
  Synthetic polynucleotide
atcatctcaccttgcctcctgaggaacggatatccacacctgcaggcacagctgcgagacacagctgcgtcgcacagctgcggaccacagctgcgctacacagctgcgactcacagctgcgtgccacagctgcggtacacagctgcgggcgcgccatgcttcatcagactct

SEQ ID NO: 11767 - DNA, 172 bp, Artificial Sequence; identical to SEQ ID NO: 11766
  Synthetic polynucleotide

SEQ ID NO: 11768 - DNA, 185 bp, Artificial Sequence
  Synthetic polynucleotide
atcatctcaccttgcctcctgctccagccgttgaagtacctgcaggaatttttgtttactttagaaatttttgtttacttttcgaatttttgtttactttgacaatttttgtttactttctaaatttttgtttactttactaatttttgtttacttttgcggcgcgccatgcttcatcagactct

SEQ ID NO: 11769 - DNA, 185 bp, Artificial Sequence; identical to SEQ ID NO: 11768
  Synthetic polynucleotide

SEQ ID NO: 11770 - DNA, 156 bp, Artificial Sequence
  Synthetic polynucleotide
atcatctcaccttgcctcctggggatatgttaagaactcctgcaggcatcaatcagacatcaatctcgcatcaatcgaccatcaatcctacatcaatcactcatcaatctgccatcaatcgtacatcaatcggcgcgccatgcttcatcagactct

SEQ ID NO: 11771 - DNA, 156 bp, Artificial Sequence; identical to SEQ ID NO: 11770
  Synthetic polynucleotide

SEQ ID NO: 11772 - DNA, 172 bp, Artificial Sequence
  Synthetic polynucleotide
atcatctcaccttgcctcctgaagtggcagactttattcctgcaggggcacgtgacagaggcacgtgactcgggcacgtgacgacggcacgtgacctaggcacgtgacactggcacgtgactgcggcacgtgacgtaggcacgtgacggcgcgccatgcttcatcagactct

SEQ ID NO: 11773 - DNA, 172 bp, Artificial Sequence; identical to SEQ ID NO: 11772
  Synthetic polynucleotide

SEQ ID NO: 11774 - DNA, 185 bp, Artificial Sequence
  Synthetic polynucleotide
atcatctcaccttgcctcctgattacgagagtcaagggcctgcaggaccggtttaaaccggtagaaccggtttaaaccggttcgaccggtttaaaccggtgacaccggtttaaaccggtctaaccggtttaaaccggtactaccggtttaaaccggttgcggcgcgccatgcttcatcagactct

SEQ ID NO: 11775 - DNA, 185 bp, Artificial Sequence; identical to SEQ ID NO: 11774
  Synthetic polynucleotide

SEQ ID NO: 11776 - DNA, 191 bp, Artificial Sequence
  Synthetic polynucleotide
atcatctcaccttgcctcctgaagccactcatgacactcctgcaggaacgctaattagcggtgagaaacgctaattagcggtgtcgaacgctaattagcggtggacaacgctaattagcggtgctaaacgctaattagcggtgactaacgctaattagcggtgtgcggcgcgccatgcttcatcagactct

SEQ ID NO: 11777 - DNA, 191 bp, Artificial Sequence; identical to SEQ ID NO: 11776
  Synthetic polynucleotide

SEQ ID NO: 11778 - DNA, 197 bp, Artificial Sequence
  Synthetic polynucleotide
atcatctcaccttgcctcctgcacggtgattcaataagcctgcagggagaacagactgtcccggagagagaacagactgtcccggtcggagaacagactgtcccgggacgagaacagactgtcccggctagagaacagactgtcccggactgagaacagactgtcccggtgcggcgcgccatgcttcatcagactct

SEQ ID NO: 11779 - DNA, 197 bp, Artificial Sequence; identical to SEQ ID NO: 11778
  Synthetic polynucleotide

SEQ ID NO: 11780 - DNA, 164 bp, Artificial Sequence
  Synthetic polynucleotide
atcatctcaccttgcctcctgcgaacttcctccacctgcctgcagggacgtcacgagagacgtcacgtcggacgtcacggacgacgtcacgctagacgtcacgactgacgtcacgtgcgacgtcacggtagacgtcacgggcgcgccatgcttcatcagactct

SEQ ID NO: 11781 - DNA, 164 bp, Artificial Sequence; identical to SEQ ID NO: 11780
  Synthetic polynucleotide

SEQ ID NO: 11782 - DNA, 188 bp, Artificial Sequence
  Synthetic polynucleotide
atcatctcaccttgcctcctgccaatatatcatcagcacctgcaggtaaggcgtcttgagataaggcgtcttgtcgtaaggcgtcttggactaaggcgtcttgctataaggcgtcttgacttaaggcgtcttgtgctaaggcgtcttggtataaggcgtcttgggcgcgccatgcttcatcagactct

SEQ ID NO: 11783 - DNA, 188 bp, Artificial Sequence; identical to SEQ ID NO: 11782
  Synthetic polynucleotide

SEQ ID NO: 11784 - DNA, 197 bp, Artificial Sequence
  Synthetic polynucleotide
atcatctcaccttgcctcctgatgagattaccctttcgcctgcagggcctagagcggccccagagcctagagcggcccctcggcctagagcggccccgacgcctagagcggccccctagcctagagcggccccactgcctagagcggcccctgcgcctagagcggccccgtaggcgcgccatgcttcatcagactct

SEQ ID NO: 11785 - DNA, 197 bp, Artificial Sequence; identical to SEQ ID NO: 11784
  Synthetic polynucleotide

SEQ ID NO: 11786 - DNA, 172 bp, Artificial Sequence
  Synthetic polynucleotide
atcatctcaccttgcctcctggattccctcatgaggctcctgcaggtcttatctgtagatcttatctgttcgtcttatctgtgactcttatctgtctatcttatctgtacttcttatctgttgctcttatctgtgtatcttatctgtggcgcgccatgcttcatcagactct

SEQ ID NO: 11787 - DNA, 172 bp, Artificial Sequence; identical to SEQ ID NO: 11786
  Synthetic polynucleotide

SEQ ID NO: 11788 - DNA, 156 bp, Artificial Sequence
  Synthetic polynucleotide
atcatctcaccttgcctcctgacgccaaagccggaatgcctgcaggcaacagaaagacaacagaatcgcaacagaagaccaacagaactacaacagaaactcaacagaatgccaacagaagtacaacagaaggcgcgccatgcttcatcagactct

SEQ ID NO: 11789 - DNA, 156 bp, Artificial Sequence; identical to SEQ ID NO: 11788
  Synthetic polynucleotide

SEQ ID NO: 11790 - DNA, 172 bp, Artificial Sequence
  Synthetic polynucleotide
atcatctcaccttgcctcctggtccaggtattccgtcccctgcagggcaataaaaaagagcaataaaaatcggcaataaaaagacgcaataaaaactagcaataaaaaactgcaataaaaatgcgcaataaaaagtagcaataaaaaggcgcgccatgcttcatcagactct

SEQ ID NO: 11791 - DNA, 172 bp, Artificial Sequence; identical to SEQ ID NO: 11790
  Synthetic polynucleotide

SEQ ID NO: 11792 - DNA, 172 bp, Artificial Sequence
  Synthetic polynucleotide
atcatctcaccttgcctcctgttaccctactagcctagcctgcaggtaaataaacaagataaataaacatcgtaaataaacagactaaataaacactataaataaacaacttaaataaacatgctaaataaacagtataaataaacaggcgcgccatgcttcatcagactct

SEQ ID NO: 11793 - DNA, 172 bp, Artificial Sequence; identical to SEQ ID NO: 11792
  Synthetic polynucleotide

SEQ ID NO: 11794 - DNA, 196 bp, Artificial Sequence
  Synthetic polynucleotide
atcatctcaccttgcctcctgttaacgtactcaaggtgcctgcaggatgcaacaggtggagaatgcaacaggtggtcgatgcaacaggtgggacatgcaacaggtggctaatgcaacaggtggactatgcaacaggtggtgcatgcaacaggtgggtaatgcaacaggtggggcgcgccatgcttcatcagactct

SEQ ID NO: 11795 - DNA, 196 bp, Artificial Sequence; identical to SEQ ID NO: 11794
  Synthetic polynucleotide

SEQ ID NO: 11796 - DNA, 186 bp, Artificial Sequence
  Synthetic polynucleotide
atcatctcaccttgcctcctgccgatcgagcagccttacctgcaggtgggggggggtggtttggggagatgggggggggtggtttggggtcgtgggggggggtggtttgggggactgggggggggtggtttggggctatgggggggggtggtttggggactggcgcgccatgcttcatcagactct

SEQ ID NO: 11797 - DNA, 186 bp, Artificial Sequence; identical to SEQ ID NO: 11796
  Synthetic polynucleotide

SEQ ID NO: 11798 - DNA, 191 bp, Artificial Sequence
  Synthetic polynucleotide
atcatctcaccttgcctcctgtccggctaacaagtgatcctgcaggcgcgccggcggctgctgagacgcgccggcggctgctgtcgcgcgccggcggctgctggaccgcgccggcggctgctgctacgcgccggcggctgctgactcgcgccggcggctgctgtgcggcgcgccatgcttcatcagactct

SEQ ID NO: 11799 - DNA, 191 bp, Artificial Sequence; identical to SEQ ID NO: 11798
  Synthetic polynucleotide

SEQ ID NO: 11800 - DNA, 188 bp, Artificial Sequence
  Synthetic polynucleotide
atcatctcaccttgcctcctgtacctacgattactacgcctgcaggccatgccgccatagaccatgccgccattcgccatgccgccatgacccatgccgccatctaccatgccgccatactccatgccgccattgcccatgccgccatgtaccatgccgccatggcgcgccatgcttcatcagactct

SEQ ID NO: 11801 - DNA, 188 bp, Artificial Sequence; identical to SEQ ID NO: 11800
  Synthetic polynucleotide

SEQ ID NO: 11802 - DNA, 185 bp, Artificial Sequence
  Synthetic polynucleotide
atcatctcaccttgcctcctgaactttattggacgcttcctgcaggaggttaattggttaaaagaaggttaattggttaaatcgaggttaattggttaaagacaggttaattggttaaactaaggttaattggttaaaactaggttaattggttaaatgcggcgcgccatgcttcatcagactct

SEQ ID NO: 11803 - DNA, 185 bp, Artificial Sequence; identical to SEQ ID NO: 11802
  Synthetic polynucleotide

SEQ ID NO: 11804 - DNA, 172 bp, Artificial Sequence
  Synthetic polynucleotide
atcatctcaccttgcctcctgatctattcgtgcattaccctgcagggttttattggagagttttattggtcggttttattgggacgttttattggctagttttattggactgttttattggtgcgttttattgggtagttttattggggcgcgccatgcttcatcagactct

SEQ ID NO: 11805 - DNA, 172 bp, Artificial Sequence; identical to SEQ ID NO: 11804
  Synthetic polynucleotide

SEQ ID NO: 11806 - DNA, 188 bp, Artificial Sequence
  Synthetic polynucleotide
atcatctcaccttgcctcctgcttgacacatgggtcgccctgcaggggtcaaaggtcaagaggtcaaaggtcatcgggtcaaaggtcagacggtcaaaggtcactaggtcaaaggtcaactggtcaaaggtcatgcggtcaaaggtcagtaggtcaaaggtcaggcgcgccatgcttcatcagactct

SEQ ID NO: 11807 - DNA, 188 bp, Artificial Sequence; identical to SEQ ID NO: 11806
  Synthetic polynucleotide

SEQ ID NO: 11808 - DNA, 140 bp, Artificial Sequence
  Synthetic polynucleotide
atcatctcaccttgcctcctgcaacgatcccaacgtagcctgcaggtatgcaagatatgcatcgtatgcagactatgcactatatgcaacttatgcatgctatgcagtatatgcaggcgcgccatgcttcatcagactct

SEQ ID NO: 11809 - DNA, 140 bp, Artificial Sequence; identical to SEQ ID NO: 11808
  Synthetic polynucleotide

SEQ ID NO: 11810 - DNA, 172 bp, Artificial Sequence
  Synthetic polynucleotide
atcatctcaccttgcctcctgcaaagcctcatcaggttcctgcaggacttccgggtagaacttccgggttcgacttccgggtgacacttccgggtctaacttccgggtactacttccgggttgcacttccgggtgtaacttccgggtggcgcgccatgcttcatcagactct

SEQ ID NO: 11811 - DNA, 172 bp, Artificial Sequence; identical to SEQ ID NO: 11810
  Synthetic polynucleotide

SEQ ID NO: 11812 - DNA, 164 bp, Artificial Sequence
  Synthetic polynucleotide
atcatctcaccttgcctcctgatgtacaattctccacccctgcaggcctggttaaagacctggttaatcgcctggttaagaccctggttaactacctggttaaactcctggttaatgccctggttaagtacctggttaaggcgcgccatgcttcatcagactct

SEQ ID NO: 11813 - DNA, 164 bp, Artificial Sequence; identical to SEQ ID NO: 11812
  Synthetic polynucleotide

SEQ ID NO: 11814 - DNA, 164 bp, Artificial Sequence
  Synthetic polynucleotide
atcatctcaccttgcctcctggaccaagtcgttaatcgcctgcaggagatggactagaagatggacttcgagatggactgacagatggactctaagatggactactagatggacttgcagatggactgtaagatggactggcgcgccatgcttcatcagactct

SEQ ID NO: 11815 - DNA, 164 bp, Artificial Sequence; identical to SEQ ID NO: 11814
  Synthetic polynucleotide

SEQ ID NO: 11816 - DNA, 156 bp, Artificial Sequence
  Synthetic polynucleotide
atcatctcaccttgcctcctgggaaatatgacagctcacctgcagggttaattaagagttaattatcggttaattagacgttaattactagttaattaactgttaattatgcgttaattagtagttaattaggcgcgccatgcttcatcagactct

SEQ ID NO: 11817 - DNA, 156 bp, Artificial Sequence; identical to SEQ ID NO: 11816
  Synthetic polynucleotide

SEQ ID NO: 11818 - DNA, 172 bp, Artificial Sequence
  Synthetic polynucleotide
atcatctcaccttgcctcctgtgtattcggtgacgtaccctgcagggaggtgtgaaagagaggtgtgaatcggaggtgtgaagacgaggtgtgaactagaggtgtgaaactgaggtgtgaatgcgaggtgtgaagtagaggtgtgaaggcgcgccatgcttcatcagactct

SEQ ID NO: 11819 - DNA, 172 bp, Artificial Sequence; identical to SEQ ID NO: 11818
  Synthetic polynucleotide

SEQ ID NO: 11820 - DNA, 164 bp, Artificial Sequence
  Synthetic polynucleotide
atcatctcaccttgcctcctgtactcacatagggtcgacctgcaggttaatccctagattaatcccttcgttaatccctgacttaatccctctattaatccctactttaatcccttgcttaatccctgtattaatccctggcgcgccatgcttcatcagactct

SEQ ID NO: 11821 - DNA, 164 bp, Artificial Sequence; identical to SEQ ID NO: 11820
  Synthetic polynucleotide

SEQ ID NO: 11822 - DNA, 197 bp, Artificial Sequence
  Synthetic polynucleotide
atcatctcaccttgcctcctgtgtgcctgatgactaggcctgcaggcacttccgggaaatgagacacttccgggaaatgtcgcacttccgggaaatggaccacttccgggaaatgctacacttccgggaaatgactcacttccgggaaatgtgccacttccgggaaatggtaggcgcgccatgcttcatcagactct

SEQ ID NO: 11823 - DNA, 197 bp, Artificial Sequence; identical to SEQ ID NO: 11822
  Synthetic polynucleotide

SEQ ID NO: 11824 - DNA, 197 bp, Artificial Sequence
  Synthetic polynucleotide
atcatctcaccttgcctcctgggacgagcggatacactcctgcaggcgataatggtaattagttagacgataatggtaattagtttcgcgataatggtaattagttgaccgataatggtaattagttctacgataatggtaattagttactcgataatggtaattagtttgcggcgcgccatgcttcatcagactct

SEQ ID NO: 11825 - DNA, 197 bp, Artificial Sequence; identical to SEQ ID NO: 11824
  Synthetic polynucleotide

SEQ ID NO: 11826 - DNA, 190 bp, Artificial Sequence
  Synthetic polynucleotide
atcatctcaccttgcctcctgacgaagaactgaaaccgcctgcaggagtaccgttatttgagaagtaccgttatttgtcgagtaccgttatttggacagtaccgttatttgctaagtaccgttatttgactagtaccgttatttgtgcagtaccgttatttggtaggcgcgccatgcttcatcagactct

SEQ ID NO: 11827 - DNA, 190 bp, Artificial Sequence; identical to SEQ ID NO: 11826
  Synthetic polynucleotide

SEQ ID NO: 11828 - DNA, 172 bp, Artificial Sequence
  Synthetic polynucleotide
atcatctcaccttgcctcctgaagccgaagtctcgagtcctgcaggagaggtcacgagaagaggtcacgtcgagaggtcacggacagaggtcacgctaagaggtcacgactagaggtcacgtgcagaggtcacggtaagaggtcacgggcgcgccatgcttcatcagactct

SEQ ID NO: 11829 - DNA, 172 bp, Artificial Sequence; identical to SEQ ID NO: 11828
  Synthetic polynucleotide

SEQ ID NO: 11830 - DNA, 172 bp, Artificial Sequence
  Synthetic polynucleotide
atcatctcaccttgcctcctgatggtgcatgcgtcgtacctgcaggagaggtcaccagaagaggtcacctcgagaggtcaccgacagaggtcaccctaagaggtcaccactagaggtcacctgcagaggtcaccgtaagaggtcaccggcgcgccatgcttcatcagactct

SEQ ID NO: 11831 - DNA, 172 bp, Artificial Sequence; identical to SEQ ID NO: 11830
  Synthetic polynucleotide

SEQ ID NO: 11832 - DNA, 156 bp, Artificial Sequence
  Synthetic polynucleotide
atcatctcaccttgcctcctgtagattccgtcgcgagtcctgcaggacagcgtcagaacagcgtctcgacagcgtcgacacagcgtcctaacagcgtcactacagcgtctgcacagcgtcgtaacagcgtcggcgcgccatgcttcatcagactct

SEQ ID NO: 11833 - DNA, 156 bp, Artificial Sequence; identical to SEQ ID NO: 11832
  Synthetic polynucleotide

SEQ ID NO: 11834 - DNA, 156 bp, Artificial Sequence
  Synthetic polynucleotide
atcatctcaccttgcctcctggtccgatagcatcacctcctgcaggttaactagagattaactagtcgttaactaggacttaactagctattaactagactttaactagtgcttaactaggtattaactagggcgcgccatgcttcatcagactct

SEQ ID NO: 11835 - DNA, 156 bp, Artificial Sequence; identical to SEQ ID NO: 11834
  Synthetic polynucleotide

SEQ ID NO: 11836 - DNA, 180 bp, Artificial Sequence
  Synthetic polynucleotide
atcatctcaccttgcctcctgctccctgtgcttaaccgcctgcaggggtaattattcagaggtaattattctcgggtaattattcgacggtaattattcctaggtaattattcactggtaattattctgcggtaattattcgtaggtaattattcggcgcgccatgcttcatcagactct

SEQ ID NO: 11837 - DNA, 180 bp, Artificial Sequence; identical to SEQ ID NO: 11836
  Synthetic polynucleotide

SEQ ID NO: 11838 - DNA, 172 bp, Artificial Sequence
  Synthetic polynucleotide
atcatctcaccttgcctcctgtatgggcctccagggttcctgcaggcgcacgggctagacgcacgggcttcgcgcacgggctgaccgcacgggctctacgcacgggctactcgcacgggcttgccgcacgggctgtacgcacgggctggcgcgccatgcttcatcagactct

SEQ ID NO: 11839 - DNA, 172 bp, Artificial Sequence; identical to SEQ ID NO: 11838
  Synthetic polynucleotide

SEQ ID NO: 11840 - DNA, 197 bp, Artificial Sequence
  Synthetic polynucleotide
atcatctcaccttgcctcctgctacccttcgacatatccctgcaggcacttcattgaattaagacacttcattgaattatcgcacttcattgaattagaccacttcattgaattactacacttcattgaattaactcacttcattgaattatgccacttcattgaattagtaggcgcgccatgcttcatcagactct

SEQ ID NO: 11841 - DNA, 197 bp, Artificial Sequence; identical to SEQ ID NO: 11840
  Synthetic polynucleotide

SEQ ID NO: 11842 - DNA, 172 bp, Artificial Sequence
  Synthetic polynucleotide
atcatctcaccttgcctcctgatcgaggatcagactctcctgcagggcgtcggccgagagcgtcggccgtcggcgtcggccggacgcgtcggccgctagcgtcggccgactgcgtcggccgtgcgcgtcggccggtagcgtcggccgggcgcgccatgcttcatcagactct

SEQ ID NO: 11843 - DNA, 172 bp, Artificial Sequence; identical to SEQ ID NO: 11842
  Synthetic polynucleotide

SEQ ID NO: 11844 - DNA, 191 bp, Artificial Sequence
  Synthetic polynucleotide
atcatctcaccttgcctcctgttggcacgtcgagtgaacctgcagggctaagtcagcaaatttagagctaagtcagcaaattttcggctaagtcagcaaatttgacgctaagtcagcaaatttctagctaagtcagcaaatttactgctaagtcagcaaattttgcggcgcgccatgcttcatcagactct

SEQ ID NO: 11845 - DNA, 191 bp, Artificial Sequence; identical to SEQ ID NO: 11844
  Synthetic polynucleotide

SEQ ID NO: 11846 - DNA, 156 bp, Artificial Sequence
  Synthetic polynucleotide
atcatctcaccttgcctcctggcgttctgctaattcctcctgcaggatttatggagaatttatggtcgatttatgggacatttatggctaatttatggactatttatggtgcatttatgggtaatttatggggcgcgccatgcttcatcagactct

SEQ ID NO: 11847 - DNA, 156 bp, Artificial Sequence; identical to SEQ ID NO: 11846
  Synthetic polynucleotide

SEQ ID NO: 11848 - DNA, 191 bp, Artificial Sequence
  Synthetic polynucleotide
atcatctcaccttgcctcctggtaatggtaaccgctcacctgcaggtttcgctaattagctttagatttcgctaattagcttttcgtttcgctaattagctttgactttcgctaattagctttctatttcgctaattagctttacttttcgctaattagcttttgcggcgcgccatgcttcatcagactct

SEQ ID NO: 11849 - DNA, 191 bp, Artificial Sequence; identical to SEQ ID NO: 11848
  Synthetic polynucleotide

SEQ ID NO: 11850 - DNA, 156 bp, Artificial Sequence
  Synthetic polynucleotide
atcatctcaccttgcctcctgcagctccctgcgatgatcctgcaggcaggtgagagacaggtgagtcgcaggtgaggaccaggtgagctacaggtgagactcaggtgagtgccaggtgaggtacaggtgagggcgcgccatgcttcatcagactct

SEQ ID NO: 11851 - DNA, 156 bp, Artificial Sequence; identical to SEQ ID NO: 11850
  Synthetic polynucleotide

SEQ ID NO: 11852 - DNA, 198 bp, Artificial Sequence
  Synthetic polynucleotide
atcatctcaccttgcctcctgataatctaccttggcttcctgcaggtcttttaatttgcataatcataaagatcttttaatttgcataatcataatcgtcttttaatttgcataatcataagactcttttaatttgcataatcataactatcttttaatttgcataatcataaggcgcgccatgcttcatcagactct

SEQ ID NO: 11853 - DNA, 198 bp, Artificial Sequence; identical to SEQ ID NO: 11852
  Synthetic polynucleotide

SEQ ID NO: 11854 - DNA, 172 bp, Artificial Sequence
  Synthetic polynucleotide
atcatctcaccttgcctcctgctcaacataaaccggcgcctgcaggcacagctgacagacacagctgactcgcacagctgacgaccacagctgacctacacagctgacactcacagctgactgccacagctgacgtacacagctgacggcgcgccatgcttcatcagactct

SEQ ID NO: 11855 - DNA, 172 bp, Artificial Sequence; identical to SEQ ID NO: 11854
  Synthetic polynucleotide

SEQ ID NO: 11856 - DNA, 172 bp, Artificial Sequence
  Synthetic polynucleotide
atcatctcaccttgcctcctgaatttccgttagtagctcctgcaggccgcgccgccagaccgcgccgcctcgccgcgccgccgacccgcgccgccctaccgcgccgccactccgcgccgcctgcccgcgccgccgtaccgcgccgccggcgcgccatgcttcatcagactct

SEQ ID NO: 11857 - DNA, 172 bp, Artificial Sequence; identical to SEQ ID NO: 11856
  Synthetic polynucleotide

SEQ ID NO: 11858 - DNA, 200 bp, Artificial Sequence
  Synthetic polynucleotide
atcatctcaccttgcctcctgagacagactctggagctcctgcaggggggagggggcggggccggagaggggagggggcggggccggtcgggggagggggcggggccgggacggggagggggcggggccggctaggggagggggcggggccggactggggagggggcggggccggggcgcgccatgcttcatcagactct

SEQ ID NO: 11859 - DNA, 200 bp, Artificial Sequence; identical to SEQ ID NO: 11858
  Synthetic polynucleotide

SEQ ID NO: 11860 - DNA, 172 bp, Artificial Sequence
  Synthetic polynucleotide
atcatctcaccttgcctcctgaataatggatgggcacgcctgcaggggcacgtgccagaggcacgtgcctcgggcacgtgccgacggcacgtgccctaggcacgtgccactggcacgtgcctgcggcacgtgccgtaggcacgtgccggcgcgccatgcttcatcagactct

SEQ ID NO: 11861 - DNA, 172 bp, Artificial Sequence; identical to SEQ ID NO: 11860
  Synthetic polynucleotide

SEQ ID NO: 11862 - DNA, 185 bp, Artificial Sequence
  Synthetic polynucleotide
atcatctcaccttgcctcctgataggatacgaccgtatcctgcaggctaggaattacttggtagactaggaattacttggttcgctaggaattacttggtgacctaggaattacttggtctactaggaattacttggtactctaggaattacttggttgcggcgcgccatgcttcatcagactct

SEQ ID NO: 11863 - DNA, 185 bp, Artificial Sequence; identical to SEQ ID NO: 11862
  Synthetic polynucleotide

SEQ ID NO: 11864 - DNA, 185 bp, Artificial Sequence
  Synthetic polynucleotide
atcatctcaccttgcctcctgtacggctaaccaggtggcctgcaggacgttaattaccccaaagaacgttaattaccccaatcgacgttaattaccccaagacacgttaattaccccaactaacgttaattaccccaaactacgttaattaccccaatgcggcgcgccatgcttcatcagactct

SEQ ID NO: 11865 - DNA, 185 bp, Artificial Sequence; identical to SEQ ID NO: 11864
  Synthetic polynucleotide

SEQ ID NO: 11866 - DNA, 188 bp, Artificial Sequence
  Synthetic polynucleotide
atcatctcaccttgcctcctgtgattgccagatcgcgtcctgcaggcgctttgttctcagacgctttgttctctcgcgctttgttctcgaccgctttgttctcctacgctttgttctcactcgctttgttctctgccgctttgttctcgtacgctttgttctcggcgcgccatgcttcatcagactct

SEQ ID NO: 11867 - DNA, 188 bp, Artificial Sequence; identical to SEQ ID NO: 11866
  Synthetic polynucleotide

SEQ ID NO: 11868 - DNA, 188 bp, Artificial Sequence
  Synthetic polynucleotide
atcatctcaccttgcctcctgtcgcggttaactctgcgcctgcaggcgggtgacgtccagacgggtgacgtcctcgcgggtgacgtccgaccgggtgacgtccctacgggtgacgtccactcgggtgacgtcctgccgggtgacgtccgtacgggtgacgtccggcgcgccatgcttcatcagactct

SEQ ID NO: 11869 - DNA, 188 bp, Artificial Sequence; identical to SEQ ID NO: 11868
  Synthetic polynucleotide

SEQ ID NO: 11870 - DNA, 190 bp, Artificial Sequence
  Synthetic polynucleotide
atcatctcaccttgcctcctgcgaacgtctagcaacatcctgcaggccgaaaccgaaactagaccgaaaccgaaacttcgccgaaaccgaaactgacccgaaaccgaaactctaccgaaaccgaaactactccgaaaccgaaacttgcccgaaaccgaaactgtaggcgcgccatgcttcatcagactct

SEQ ID NO: 11871 - DNA, 190 bp, Artificial Sequence; identical to SEQ ID NO: 11870
  Synthetic polynucleotide

SEQ ID NO: 11872 - DNA, 180 bp, Artificial Sequence
  Synthetic polynucleotide
atcatctcaccttgcctcctgtatctaaagcgggaaatcctgcaggcacttccggttagacacttccggtttcgcacttccggttgaccacttccggttctacacttccggttactcacttccggtttgccacttccggttgtacacttccggttggcgcgccatgcttcatcagactct

SEQ ID NO: 11873 - DNA, 180 bp, Artificial Sequence; identical to SEQ ID NO: 11872
  Synthetic polynucleotide

SEQ ID NO: 11874 - DNA, 188 bp, Artificial Sequence
  Synthetic polynucleotide
atcatctcaccttgcctcctgactaacatattaccgcccctgcaggggacgtcacccgagaggacgtcacccgtcgggacgtcacccggacggacgtcacccgctaggacgtcacccgactggacgtcacccgtgcggacgtcacccggtaggacgtcacccgggcgcgccatgcttcatcagactct

SEQ ID NO: 11875 - DNA, 188 bp, Artificial Sequence; identical to SEQ ID NO: 11874
  Synthetic polynucleotide

SEQ ID NO: 11876 - DNA, 196 bp, Artificial Sequence
  Synthetic polynucleotide
atcatctcaccttgcctcctgagatgatgtgatgcctacctgcaggcttccgggaaatgagacttccgggaaatgtcgcttccgggaaatggaccttccgggaaatgctacttccgggaaatgactcttccgggaaatgtgccttccgggaaatggtacttccgggaaatgggcgcgccatgcttcatcagactct

SEQ ID NO: 11877 - DNA, 196 bp, Artificial Sequence; identical to SEQ ID NO: 11876
  Synthetic polynucleotide

SEQ ID NO: 11878 - DNA, 200 bp, Artificial Sequence
  Synthetic polynucleotide
atcatctcaccttgcctcctgacagtttcgttatgaaccctgcaggtcaggtcacagtgacctgtagatcaggtcacagtgacctgttcgtcaggtcacagtgacctgtgactcaggtcacagtgacctgtctatcaggtcacagtgacctgtacttcaggtcacagtgacctgtggcgcgccatgcttcatcagactct

SEQ ID NO: 11879 - DNA, 200 bp, Artificial Sequence; identical to SEQ ID NO: 11878
  Synthetic polynucleotide

SEQ ID NO: 11880 - DNA, 188 bp, Artificial Sequence
  Synthetic polynucleotide
atcatctcaccttgcctcctgacccgatgtgtatgatacctgcaggagtttcgctttcagaagtttcgctttctcgagtttcgctttcgacagtttcgctttcctaagtttcgctttcactagtttcgctttctgcagtttcgctttcgtaagtttcgctttcggcgcgccatgcttcatcagactct

SEQ ID NO: 11881 - DNA, 188 bp, Artificial Sequence; identical to SEQ ID NO: 11880
  Synthetic polynucleotide

SEQ ID NO: 11882 - DNA, 164 bp, Artificial Sequence
  Synthetic polynucleotide
atcatctcaccttgcctcctgactaggtagcctggtcacctgcaggctgaaacagagactgaaacagtcgctgaaacaggacctgaaacagctactgaaacagactctgaaacagtgcctgaaacaggtactgaaacagggcgcgccatgcttcatcagactct

SEQ ID NO: 11883 - DNA, 164 bp, Artificial Sequence; identical to SEQ ID NO: 11882
  Synthetic polynucleotide

SEQ ID NO: 11884 - DNA, 156 bp, Artificial Sequence
  Synthetic polynucleotide
atcatctcaccttgcctcctgaagtggtcagaatacgccctgcaggatttatgtagaatttatgttcgatttatgtgacatttatgtctaatttatgtactatttatgttgcatttatgtgtaatttatgtggcgcgccatgcttcatcagactct

SEQ ID NO: 11885 - DNA, 156 bp, Artificial Sequence; identical to SEQ ID NO: 11884
  Synthetic polynucleotide

SEQ ID NO: 11886 - DNA, 156 bp, Artificial Sequence
  Synthetic polynucleotide
atcatctcaccttgcctcctgacatcttcccagatatgcctgcagggttaactaagagttaactatcggttaactagacgttaactactagttaactaactgttaactatgcgttaactagtagttaactaggcgcgccatgcttcatcagactct

SEQ ID NO: 11887 - DNA, 156 bp, Artificial Sequence; identical to SEQ ID NO: 11886
  Synthetic polynucleotide

SEQ ID NO: 11888 - DNA, 140 bp, Artificial Sequence
  Synthetic polynucleotide
atcatctcaccttgcctcctgaatatagtgcgatagcccctgcaggcgtcatagacgtcattcgcgtcatgaccgtcatctacgtcatactcgtcattgccgtcatgtacgtcatggcgcgccatgcttcatcagactct

SEQ ID NO: 11889 - DNA, 140 bp, Artificial Sequence; identical to SEQ ID NO: 11888
  Synthetic polynucleotide

SEQ ID NO: 11890 - DNA, 190 bp, Artificial Sequence
  Synthetic polynucleotide
atcatctcaccttgcctcctggcgacattggattcctgcctgcaggaactacaactcccaagaaactacaactcccatcgaactacaactcccagacaactacaactcccactaaactacaactcccaactaactacaactcccatgcaactacaactcccagtaggcgcgccatgcttcatcagactct

SEQ ID NO: 11891 - DNA, 190 bp, Artificial Sequence; identical to SEQ ID NO: 11890
  Synthetic polynucleotide

SEQ ID NO: 11892 - DNA, 197 bp, Artificial Sequence
  Synthetic polynucleotide
atcatctcaccttgcctcctgccttccctgtttcaatccctgcaggcgccccctggtggccagacgccccctggtggcctcgcgccccctggtggccgaccgccccctggtggccctacgccccctggtggccactcgccccctggtggcctgccgccccctggtggccgtaggcgcgccatgcttcatcagactct

SEQ ID NO: 11893 - DNA, 197 bp, Artificial Sequence; identical to SEQ ID NO: 11892
  Synthetic polynucleotide

SEQ ID NO: 11894 - DNA, 172 bp, Artificial Sequence
  Synthetic polynucleotide
atcatctcaccttgcctcctgctgacgagaggcataatcctgcaggtgcaggttgaagatgcaggttgatcgtgcaggttgagactgcaggttgactatgcaggttgaacttgcaggttgatgctgcaggttgagtatgcaggttgaggcgcgccatgcttcatcagactct

SEQ ID NO: 11895 - DNA, 172 bp, Artificial Sequence; identical to SEQ ID NO: 11894
  Synthetic polynucleotide

SEQ ID NO: 11896 - DNA, 188 bp, Artificial Sequence
  Synthetic polynucleotide
atcatctcaccttgcctcctgaacagtcaccaaccacgcctgcaggcaatggaaaattagacaatggaaaatttcgcaatggaaaattgaccaatggaaaattctacaatggaaaattactcaatggaaaatttgccaatggaaaattgtacaatggaaaattggcgcgccatgcttcatcagactct

SEQ ID NO: 11897 - DNA, 188 bp, Artificial Sequence; identical to SEQ ID NO: 11896
  Synthetic polynucleotide

SEQ ID NO: 11898 - DNA, 188 bp, Artificial Sequence
  Synthetic polynucleotide
atcatctcaccttgcctcctgctttgccaacaggcagtcctgcaggcgccccccccccagacgcccccccccctcgcgccccccccccgaccgccccccccccctacgccccccccccactcgcccccccccctgccgccccccccccgtacgccccccccccggcgcgccatgcttcatcagactct

SEQ ID NO: 11899 - DNA, 188 bp, Artificial Sequence; identical to SEQ ID NO: 11898
  Synthetic polynucleotide

SEQ ID NO: 11900 - DNA, 197 bp, Artificial Sequence
  Synthetic polynucleotide
atcatctcaccttgcctcctgggtaacgctgcgtttgccctgcagggtcacgcttggctgcagagtcacgcttggctgctcggtcacgcttggctgcgacgtcacgcttggctgcctagtcacgcttggctgcactgtcacgcttggctgctgcgtcacgcttggctgcgtaggcgcgccatgcttcatcagactct

SEQ ID NO: 11901 - DNA, 197 bp, Artificial Sequence; identical to SEQ ID NO: 11900
  Synthetic polynucleotide

SEQ ID NO: 11902 - DNA, 164 bp, Artificial Sequence
  Synthetic polynucleotide
atcatctcaccttgcctcctgccagaggatagacgtcccctgcaggaatgcagtgagaaatgcagtgtcgaatgcagtggacaatgcagtgctaaatgcagtgactaatgcagtgtgcaatgcagtggtaaatgcagtgggcgcgccatgcttcatcagactct

SEQ ID NO: 11903 - DNA, 164 bp, Artificial Sequence; identical to SEQ ID NO: 11902
  Synthetic polynucleotide

SEQ ID NO: 11904 - DNA, 156 bp, Artificial Sequence
  Synthetic polynucleotide
atcatctcaccttgcctcctgagcatttgcaccgccgtcctgcaggttaaccagagattaaccagtcgttaaccaggacttaaccagctattaaccagactttaaccagtgcttaaccaggtattaaccagggcgcgccatgcttcatcagactct

SEQ ID NO: 11905 - DNA, 156 bp, Artificial Sequence; identical to SEQ ID NO: 11904
  Synthetic polynucleotide

SEQ ID NO: 11906 - DNA, 180 bp, Artificial Sequence
  Synthetic polynucleotide
atcatctcaccttgcctcctgtgtggagccatttatcgcctgcaggggtgactcatgagaggtgactcatgtcgggtgactcatggacggtgactcatgctaggtgactcatgactggtgactcatgtgcggtgactcatggtaggtgactcatgggcgcgccatgcttcatcagactct

SEQ ID NO: 11907 - DNA, 180 bp, Artificial Sequence; identical to SEQ ID NO: 11906
  Synthetic polynucleotide

SEQ ID NO: 11908 - DNA, 200 bp, Artificial Sequence
  Synthetic polynucleotide
atcatctcaccttgcctcctgttaggaagacagtatcgcctgcaggtctccctttcttcccttccccttctctcctagatctccctttcttcccttccccttctctccttcgtctccctttcttcccttccccttctctcctgactctccctttcttcccttccccttctctcctggcgcgccatgcttcatcagactct

SEQ ID NO: 11909 - DNA, 200 bp, Artificial Sequence; identical to SEQ ID NO: 11908
  Synthetic polynucleotide

SEQ ID NO: 11910 - DNA, 172 bp, Artificial Sequence
  Synthetic polynucleotide
atcatctcaccttgcctcctgtgacctctcttcttgatcctgcaggattcatctttagaattcatcttttcgattcatctttgacattcatctttctaattcatctttactattcatcttttgcattcatctttgtaattcatctttggcgcgccatgcttcatcagactct

SEQ ID NO: 11911 - DNA, 172 bp, Artificial Sequence; identical to SEQ ID NO: 11910
  Synthetic polynucleotide

SEQ ID NO: 11912 - DNA, 197 bp, Artificial Sequence
  Synthetic polynucleotide
atcatctcaccttgcctcctgcgttgtcaatcgaaacacctgcaggagcgccccctggtggagaagcgccccctggtggtcgagcgccccctggtgggacagcgccccctggtggctaagcgccccctggtggactagcgccccctggtggtgcagcgccccctggtgggtaggcgcgccatgcttcatcagactct

SEQ ID NO: 11913 - DNA, 197 bp, Artificial Sequence; identical to SEQ ID NO: 11912
  Synthetic polynucleotide

SEQ ID NO: 11914 - DNA, 188 bp, Artificial Sequence
  Synthetic polynucleotide
atcatctcaccttgcctcctgacccataagccaatacacctgcaggcgcccgccggcgagacgcccgccggcgtcgcgcccgccggcggaccgcccgccggcgctacgcccgccggcgactcgcccgccggcgtgccgcccgccggcggtacgcccgccggcgggcgcgccatgcttcatcagactct

SEQ ID NO: 11915 - DNA, 188 bp, Artificial Sequence; identical to SEQ ID NO: 11914
  Synthetic polynucleotide

SEQ ID NO: 11916 - DNA, 197 bp, Artificial Sequence
  Synthetic polynucleotide
atcatctcaccttgcctcctgacgatcgatgttggcctcctgcaggtaactcacgcatgactgtagataactcacgcatgactgttcgtaactcacgcatgactgtgactaactcacgcatgactgtctataactcacgcatgactgtacttaactcacgcatgactgttgcggcgcgccatgcttcatcagactct

SEQ ID NO: 11917 - DNA, 197 bp, Artificial Sequence; identical to SEQ ID NO: 11916
  Synthetic polynucleotide

SEQ ID NO: 11918 - DNA, 197 bp, Artificial Sequence
  Synthetic polynucleotide
atcatctcaccttgcctcctgcgagttctgggcgtagtcctgcaggatcccctcaggcggtagaatcccctcaggcggttcgatcccctcaggcggtgacatcccctcaggcggtctaatcccctcaggcggtactatcccctcaggcggttgcatcccctcaggcggtgtaggcgcgccatgcttcatcagactct

SEQ ID NO: 11919 - DNA, 197 bp, Artificial Sequence; identical to SEQ ID NO: 11918
  Synthetic polynucleotide

SEQ ID NO: 11920 - DNA, 180 bp, Artificial Sequence
  Synthetic polynucleotide
atcatctcaccttgcctcctggatgcatcgcactcttacctgcaggggtgactcatcagaggtgactcatctcgggtgactcatcgacggtgactcatcctaggtgactcatcactggtgactcatctgcggtgactcatcgtaggtgactcatcggcgcgccatgcttcatcagactct

SEQ ID NO: 11921 - DNA, 180 bp, Artificial Sequence; identical to SEQ ID NO: 11920
  Synthetic polynucleotide

SEQ ID NO: 11922 - DNA, 172 bp, Artificial Sequence
  Synthetic polynucleotide
atcatctcaccttgcctcctgttcatcctaggcctgtccctgcaggagcccgtgcgagaagcccgtgcgtcgagcccgtgcggacagcccgtgcgctaagcccgtgcgactagcccgtgcgtgcagcccgtgcggtaagcccgtgcgggcgcgccatgcttcatcagactct

SEQ ID NO: 11923 - DNA, 172 bp, Artificial Sequence; identical to SEQ ID NO: 11922
  Synthetic polynucleotide

SEQ ID NO: 11924 - DNA, 172 bp, Artificial Sequence
  Synthetic polynucleotide
atcatctcaccttgcctcctgctcacagctaatggctgcctgcaggatgaataaatagaatgaataaattcgatgaataaatgacatgaataaatctaatgaataaatactatgaataaattgcatgaataaatgtaatgaataaatggcgcgccatgcttcatcagactct

SEQ ID NO: 11925 - DNA, 172 bp, Artificial Sequence; identical to SEQ ID NO: 11924
  Synthetic polynucleotide

SEQ ID NO: 11926 - DNA, 180 bp, Artificial Sequence
  Synthetic polynucleotide
atcatctcaccttgcctcctggcctaagggctgttcgacctgcagggccctgccgccagagccctgccgcctcggccctgccgccgacgccctgccgccctagccctgccgccactgccctgccgcctgcgccctgccgccgtagccctgccgccggcgcgccatgcttcatcagactct

SEQ ID NO: 11927 - DNA, 180 bp, Artificial Sequence; identical to SEQ ID NO: 11926
  Synthetic polynucleotide

SEQ ID NO: 11928 - DNA, 148 bp, Artificial Sequence
  Synthetic polynucleotide
atcatctcaccttgcctcctgtgattcaataccgtgttcctgcaggccgccgcagaccgccgctcgccgccgcgacccgccgcctaccgccgcactccgccgctgcccgccgcgtaccgccgcggcgcgccatgcttcatcagactct

SEQ ID NO: 11929 - DNA, 148 bp, Artificial Sequence; identical to SEQ ID NO: 11928
  Synthetic polynucleotide

SEQ ID NO: 11930 - DNA, 172 bp, Artificial Sequence
  Synthetic polynucleotide
atcatctcaccttgcctcctgctcaattgactcagaaccctgcaggggcgcgtgccagaggcgcgtgcctcgggcgcgtgccgacggcgcgtgccctaggcgcgtgccactggcgcgtgcctgcggcgcgtgccgtaggcgcgtgccggcgcgccatgcttcatcagactct

SEQ ID NO: 11931 - DNA, 172 bp, Artificial Sequence; identical to SEQ ID NO: 11930
  Synthetic polynucleotide

SEQ ID NO: 11932 - DNA, 191 bp, Artificial Sequence
  Synthetic polynucleotide
atcatctcaccttgcctcctggagagtcatccctacgccctgcaggggagaaatttctagaatagaggagaaatttctagaattcgggagaaatttctagaatgacggagaaatttctagaatctaggagaaatttctagaatactggagaaatttctagaattgcggcgcgccatgcttcatcagactct

SEQ ID NO: 11933 - DNA, 191 bp, Artificial Sequence; identical to SEQ ID NO: 11932
  Synthetic polynucleotide

SEQ ID NO: 11934 - DNA, 172 bp, Artificial Sequence
  Synthetic polynucleotide
atcatctcaccttgcctcctgctccactgagctagcgtcctgcagggggaatttccagagggaatttcctcggggaatttccgacgggaatttccctagggaatttccactgggaatttcctgcgggaatttccgtagggaatttccggcgcgccatgcttcatcagactct

SEQ ID NO: 11935 - DNA, 172 bp, Artificial Sequence; identical to SEQ ID NO: 11934
  Synthetic polynucleotide

SEQ ID NO: 11936 - DNA, 190 bp, Artificial Sequence
  Synthetic polynucleotide
atcatctcaccttgcctcctgaaagcgaattaccgaaacctgcaggtaattgttctaaacagataattgttctaaactcgtaattgttctaaacgactaattgttctaaacctataattgttctaaacacttaattgttctaaactgctaattgttctaaacgtaggcgcgccatgcttcatcagactct

SEQ ID NO: 11937 - DNA, 190 bp, Artificial Sequence; identical to SEQ ID NO: 11936
  Synthetic polynucleotide

SEQ ID NO: 11938 - DNA, 196 bp, Artificial Sequence
  Synthetic polynucleotide
atcatctcaccttgcctcctgaccaggctggatgctaccctgcaggatgacatcatcttagaatgacatcatctttcgatgacatcatcttgacatgacatcatcttctaatgacatcatcttactatgacatcatctttgcatgacatcatcttgtaatgacatcatcttggcgcgccatgcttcatcagactct

SEQ ID NO: 11939 - DNA, 196 bp, Artificial Sequence; identical to SEQ ID NO: 11938
  Synthetic polynucleotide

SEQ ID NO: 11940 - DNA, 156 bp, Artificial Sequence
  Synthetic polynucleotide
atcatctcaccttgcctcctgagtagattgtccagagccctgcaggttacgtaaagattacgtaatcgttacgtaagacttacgtaactattacgtaaactttacgtaatgcttacgtaagtattacgtaaggcgcgccatgcttcatcagactct

SEQ ID NO: 11941 - DNA, 156 bp, Artificial Sequence; identical to SEQ ID NO: 11940
  Synthetic polynucleotide

SEQ ID NO: 11942 - DNA, 191 bp, Artificial Sequence
  Synthetic polynucleotide
atcatctcaccttgcctcctgctgcgttcgtggtagaacctgcagggaactacaattcccagaaggcagagaactacaattcccagaaggctcggaactacaattcccagaaggcgacgaactacaattcccagaaggcctagaactacaattcccagaaggcactggcgcgccatgcttcatcagactct

SEQ ID NO: 11943 - DNA, 191 bp, Artificial Sequence; identical to SEQ ID NO: 11942
  Synthetic polynucleotide

SEQ ID NO: 11944 - DNA, 191 bp, Artificial Sequence
  Synthetic polynucleotide
atcatctcaccttgcctcctgctcgatttactagggtgcctgcaggtgacctctggtgaccttagatgacctctggtgacctttcgtgacctctggtgaccttgactgacctctggtgaccttctatgacctctggtgaccttacttgacctctggtgacctttgcggcgcgccatgcttcatcagactct

SEQ ID NO: 11945 - DNA, 191 bp, Artificial Sequence; identical to SEQ ID NO: 11944
  Synthetic polynucleotide

SEQ ID NO: 11946 - DNA, 191 bp, Artificial Sequence
  Synthetic polynucleotide
atcatctcaccttgcctcctgttattgtcggacgccaccctgcaggacgcagctgtcaatatcagaacgcagctgtcaatatctcgacgcagctgtcaatatcgacacgcagctgtcaatatcctaacgcagctgtcaatatcactacgcagctgtcaatatctgcggcgcgccatgcttcatcagactct

SEQ ID NO: 11947 - DNA, 191 bp, Artificial Sequence; identical to SEQ ID NO: 11946
  Synthetic polynucleotide

SEQ ID NO: 11948 - DNA, 191 bp, Artificial Sequence
  Synthetic polynucleotide
atcatctcaccttgcctcctgatcaaagcggcgggatacctgcaggaggtcaccgagaggtcaagaaggtcaccgagaggtcatcgaggtcaccgagaggtcagacaggtcaccgagaggtcactaaggtcaccgagaggtcaactaggtcaccgagaggtcatgcggcgcgccatgcttcatcagactct

SEQ ID NO: 11949 - DNA, 191 bp, Artificial Sequence; identical to SEQ ID NO: 11948
  Synthetic polynucleotide

SEQ ID NO: 11950 - DNA, 188 bp, Artificial Sequence
  Synthetic polynucleotide
atcatctcaccttgcctcctgtcagcagactccgaatgcctgcaggtcttcctgcgagagatcttcctgcgagtcgtcttcctgcgaggactcttcctgcgagctatcttcctgcgagacttcttcctgcgagtgctcttcctgcgaggtatcttcctgcgagggcgcgccatgcttcatcagactct

SEQ ID NO: 11951 - DNA, 188 bp, Artificial Sequence; identical to SEQ ID NO: 11950
  Synthetic polynucleotide

SEQ ID NO: 11952 - DNA, 188 bp, Artificial Sequence
  Synthetic polynucleotide
atcatctcaccttgcctcctgttaggaactgtcaatgacctgcagggaccacgtgacaagagaccacgtgacatcggaccacgtgacagacgaccacgtgacactagaccacgtgacaactgaccacgtgacatgcgaccacgtgacagtagaccacgtgacaggcgcgccatgcttcatcagactct

SEQ ID NO: 11953 - DNA, 188 bp, Artificial Sequence; identical to SEQ ID NO: 11952
  Synthetic polynucleotide

SEQ ID NO: 11954 - DNA, 164 bp, Artificial Sequence
  Synthetic polynucleotide
atcatctcaccttgcctcctgttctacattagcctaaccctgcaggagccaatcaagaagccaatcatcgagccaatcagacagccaatcactaagccaatcaactagccaatcatgcagccaatcagtaagccaatcaggcgcgccatgcttcatcagactct

SEQ ID NO: 11955 - DNA, 164 bp, Artificial Sequence; identical to SEQ ID NO: 11954
  Synthetic polynucleotide

SEQ ID NO: 11956 - DNA, 188 bp, Artificial Sequence
  Synthetic polynucleotide
atcatctcaccttgcctcctggtttctgagagaggctgcctgcaggtttgccaaatttagatttgccaaattttcgtttgccaaatttgactttgccaaatttctatttgccaaatttacttttgccaaattttgctttgccaaatttgtatttgccaaatttggcgcgccatgcttcatcagactct

SEQ ID NO: 11957 - DNA, 188 bp, Artificial Sequence; identical to SEQ ID NO: 11956
  Synthetic polynucleotide

SEQ ID NO: 11958 - DNA, 148 bp, Artificial Sequence
  Synthetic polynucleotide
atcatctcaccttgcctcctgctgcggtttggagacatcctgcaggtgagtcaagatgagtcatcgtgagtcagactgagtcactatgagtcaacttgagtcatgctgagtcagtatgagtcaggcgcgccatgcttcatcagactct

SEQ ID NO: 11959 - DNA, 148 bp, Artificial Sequence; identical to SEQ ID NO: 11958
  Synthetic polynucleotide

SEQ ID NO: 11960 - DNA, 190 bp, Artificial Sequence
  Synthetic polynucleotide
atcatctcaccttgcctcctgatttcaagttgacagctcctgcaggggtaattattaaccagaggtaattattaacctcgggtaattattaaccgacggtaattattaaccctaggtaattattaaccactggtaattattaacctgcggtaattattaaccgtaggcgcgccatgcttcatcagactct

SEQ ID NO: 11961 - DNA, 190 bp, Artificial Sequence; identical to SEQ ID NO: 11960
  Synthetic polynucleotide

SEQ ID NO: 11962 - DNA, 185 bp, Artificial Sequence
  Synthetic polynucleotide
atcatctcaccttgcctcctgggtaaccgatcttgctgcctgcaggcccagggtaacagccgagacccagggtaacagccgtcgcccagggtaacagccggaccccagggtaacagccgctacccagggtaacagccgactcccagggtaacagccgtgcggcgcgccatgcttcatcagactct

SEQ ID NO: 11963 - DNA, 185 bp, Artificial Sequence; identical to SEQ ID NO: 11962
  Synthetic polynucleotide

SEQ ID NO: 11964 - DNA, 190 bp, Artificial Sequence
  Synthetic polynucleotide
atcatctcaccttgcctcctgcagttgctcgtgggcatcctgcagggccaccagggggcgagagccaccagggggcgtcggccaccagggggcggacgccaccagggggcgctagccaccagggggcgactgccaccagggggcgtgcgccaccagggggcggtaggcgcgccatgcttcatcagactct

SEQ ID NO: 11965 - DNA, 190 bp, Artificial Sequence; identical to SEQ ID NO: 11964
  Synthetic polynucleotide

SEQ ID NO: 11966 - DNA, 172 bp, Artificial Sequence
  Synthetic polynucleotide
atcatctcaccttgcctcctggattgaccctcactccccctgcaggtccaattaacagatccaattaactcgtccaattaacgactccaattaacctatccaattaacacttccaattaactgctccaattaacgtatccaattaacggcgcgccatgcttcatcagactct

SEQ ID NO: 11967 - DNA, 172 bp, Artificial Sequence; identical to SEQ ID NO: 11966
  Synthetic polynucleotide

SEQ ID NO: 11968 - DNA, 180 bp, Artificial Sequence
  Synthetic polynucleotide
atcatctcaccttgcctcctgcgtcgctcgtacataagcctgcaggagaccacccagagaagaccacccagtcgagaccacccaggacagaccacccagctaagaccacccagactagaccacccagtgcagaccacccaggtaagaccacccagggcgcgccatgcttcatcagactct

SEQ ID NO: 11969 - DNA, 180 bp, Artificial Sequence; identical to SEQ ID NO: 11968
  Synthetic polynucleotide

SEQ ID NO: 11970 - DNA, 172 bp, Artificial Sequence
  Synthetic polynucleotide
atcatctcaccttgcctcctgtgacacgaatacctcttcctgcaggccgcggcggcagaccgcggcggctcgccgcggcggcgacccgcggcggcctaccgcggcggcactccgcggcggctgcccgcggcggcgtaccgcggcggcggcgcgccatgcttcatcagactct

SEQ ID NO: 11971 - DNA, 172 bp, Artificial Sequence; identical to SEQ ID NO: 11970
  Synthetic polynucleotide

SEQ ID NO: 11972 - DNA, 196 bp, Artificial Sequence
  Synthetic polynucleotide
atcatctcaccttgcctcctggatgtgaagagacgactcctgcaggcaccacgtgggcaagacaccacgtgggcatcgcaccacgtgggcagaccaccacgtgggcactacaccacgtgggcaactcaccacgtgggcatgccaccacgtgggcagtacaccacgtgggcaggcgcgccatgcttcatcagactct

SEQ ID NO: 11973 - DNA, 196 bp, Artificial Sequence; identical to SEQ ID NO: 11972
  Synthetic polynucleotide

SEQ ID NO: 11974 - DNA, 156 bp, Artificial Sequence
  Synthetic polynucleotide
atcatctcaccttgcctcctgcccggtactttaagaatcctgcaggttacgtacagattacgtactcgttacgtacgacttacgtacctattacgtacactttacgtactgcttacgtacgtattacgtacggcgcgccatgcttcatcagactct

SEQ ID NO: 11975 - DNA, 156 bp, Artificial Sequence; identical to SEQ ID NO: 11974
  Synthetic polynucleotide

SEQ ID NO: 11976 - DNA, 172 bp, Artificial Sequence
  Synthetic polynucleotide
atcatctcaccttgcctcctggaggattaggttctccccctgcaggtaagatctttagataagatcttttcgtaagatctttgactaagatctttctataagatctttacttaagatcttttgctaagatctttgtataagatctttggcgcgccatgcttcatcagactct

SEQ ID NO: 11977 - DNA, 172 bp, Artificial Sequence; identical to SEQ ID NO: 11976
  Synthetic polynucleotide

SEQ ID NO: 11978 - DNA, 172 bp, Artificial Sequence
  Synthetic polynucleotide
atcatctcaccttgcctcctgcttaagaaaccggactacctgcaggcttccggctcagacttccggctctcgcttccggctcgaccttccggctcctacttccggctcactcttccggctctgccttccggctcgtacttccggctcggcgcgccatgcttcatcagactct

SEQ ID NO: 11979 - DNA, 172 bp, Artificial Sequence; identical to SEQ ID NO: 11978
  Synthetic polynucleotide

SEQ ID NO: 11980 - DNA, 156 bp, Artificial Sequence
  Synthetic polynucleotide
atcatctcaccttgcctcctgacctagggagcttccgacctgcaggtaattagcagataattagctcgtaattagcgactaattagcctataattagcacttaattagctgctaattagcgtataattagcggcgcgccatgcttcatcagactct

SEQ ID NO: 11981 - DNA, 156 bp, Artificial Sequence; identical to SEQ ID NO: 11980
  Synthetic polynucleotide

SEQ ID NO: 11982 - DNA, 156 bp, Artificial Sequence
  Synthetic polynucleotide
atcatctcaccttgcctcctggcaccgctgaacaactacctgcaggttgacctcagattgacctctcgttgacctcgacttgacctcctattgacctcactttgacctctgcttgacctcgtattgacctcggcgcgccatgcttcatcagactct

SEQ ID NO: 11983 - DNA, 156 bp, Artificial Sequence; identical to SEQ ID NO: 11982
  Synthetic polynucleotide

SEQ ID NO: 11984 - DNA, 172 bp, Artificial Sequence
  Synthetic polynucleotide
atcatctcaccttgcctcctgtagcacctagaggcttccctgcaggagcacgtggtagaagcacgtggttcgagcacgtggtgacagcacgtggtctaagcacgtggtactagcacgtggttgcagcacgtggtgtaagcacgtggtggcgcgccatgcttcatcagactct

SEQ ID NO: 11985 - DNA, 172 bp, Artificial Sequence; identical to SEQ ID NO: 11984
  Synthetic polynucleotide

SEQ ID NO: 11986 - DNA, 190 bp, Artificial Sequence
  Synthetic polynucleotide
atcatctcaccttgcctcctgtccatccggaacctgtacctgcagggttctatttatagcagagttctatttatagctcggttctatttatagcgacgttctatttatagcctagttctatttatagcactgttctatttatagctgcgttctatttatagcgtaggcgcgccatgcttcatcagactct

SEQ ID NO: 11987 - DNA, 190 bp, Artificial Sequence; identical to SEQ ID NO: 11986
  Synthetic polynucleotide

SEQ ID NO: 11988 - DNA, 140 bp, Artificial Sequence
  Synthetic polynucleotide
atcatctcaccttgcctcctgggtagcttcatgttgagcctgcaggtgcataagatgcatatcgtgcatagactgcatactatgcataacttgcatatgctgcatagtatgcataggcgcgccatgcttcatcagactct

SEQ ID NO: 11989 - DNA, 140 bp, Artificial Sequence; identical to SEQ ID NO: 11988
  Synthetic polynucleotide

SEQ ID NO: 11990 - DNA, 172 bp, Artificial Sequence
  Synthetic polynucleotide
atcatctcaccttgcctcctggtatgacagtatttgcacctgcaggaacatatgttagaaacatatgtttcgaacatatgttgacaacatatgttctaaacatatgttactaacatatgtttgcaacatatgttgtaaacatatgttggcgcgccatgcttcatcagactct

SEQ ID NO: 11991 - DNA, 172 bp, Artificial Sequence; identical to SEQ ID NO: 11990
  Synthetic polynucleotide

SEQ ID NO: 11992 - DNA, 196 bp, Artificial Sequence
  Synthetic polynucleotide
atcatctcaccttgcctcctgcactctcccgtaatcttcctgcaggagatgcaatccccagaagatgcaatcccctcgagatgcaatccccgacagatgcaatccccctaagatgcaatccccactagatgcaatcccctgcagatgcaatccccgtaagatgcaatccccggcgcgccatgcttcatcagactct

SEQ ID NO: 11993 - DNA, 196 bp, Artificial Sequence; identical to SEQ ID NO: 11992
  Synthetic polynucleotide

SEQ ID NO: 11994 - DNA, 156 bp, Artificial Sequence
  Synthetic polynucleotide
atcatctcaccttgcctcctgagtttaaagtgactgaccctgcaggttgacctgagattgacctgtcgttgacctggacttgacctgctattgacctgactttgacctgtgcttgacctggtattgacctgggcgcgccatgcttcatcagactct

SEQ ID NO: 11995 - DNA, 156 bp, Artificial Sequence; identical to SEQ ID NO: 11994
  Synthetic polynucleotide

SEQ ID NO: 11996 - DNA, 179 bp, Artificial Sequence
  Synthetic polynucleotide
atcatctcaccttgcctcctggtccaagccatagtagccctgcaggacaaaataaatcacagcatatgccagaacaaaataaatcacagcatatgcctcgacaaaataaatcacagcatatgccgacacaaaataaatcacagcatatgccctaggcgcgccatgcttcatcagactct

SEQ ID NO: 11997 - DNA, 179 bp, Artificial Sequence; identical to SEQ ID NO: 11996
  Synthetic polynucleotide

SEQ ID NO: 11998 - DNA, 180 bp, Artificial Sequence
  Synthetic polynucleotide
atcatctcaccttgcctcctggagacttgttgcacctacctgcaggagaccacccacagaagaccacccactcgagaccacccacgacagaccacccacctaagaccacccacactagaccacccactgcagaccacccacgtaagaccacccacggcgcgccatgcttcatcagactct

SEQ ID NO: 11999 - DNA, 180 bp, Artificial Sequence; identical to SEQ ID NO: 11998
  Synthetic polynucleotide

SEQ ID NO: 12000 - DNA, 148 bp, Artificial Sequence
  Synthetic polynucleotide
atcatctcaccttgcctcctgggctgatcagaactgggcctgcaggaggatgtagaaggatgttcgaggatgtgacaggatgtctaaggatgtactaggatgttgcaggatgtgtaaggatgtggcgcgccatgcttcatcagactct

SEQ ID NO: 12001 - DNA, 148 bp, Artificial Sequence; identical to SEQ ID NO: 12000
  Synthetic polynucleotide

SEQ ID NO: 12002 - DNA, 190 bp, Artificial Sequence
  Synthetic polynucleotide
atcatctcaccttgcctcctgcgttcgcacgtagctgtcctgcaggggacttccggttggagaggacttccggttggtcgggacttccggttgggacggacttccggttggctaggacttccggttggactggacttccggttggtgcggacttccggttgggtaggcgcgccatgcttcatcagactct

SEQ ID NO: 12003 - DNA, 190 bp, Artificial Sequence; identical to SEQ ID NO: 12002
  Synthetic polynucleotide

SEQ ID NO: 12004 - DNA, 191 bp, Artificial Sequence
  Synthetic polynucleotide
atcatctcaccttgcctcctggatggctgactcattctcctgcaggcgaattaattaagaaacagacgaattaattaagaaactcgcgaattaattaagaaacgaccgaattaattaagaaacctacgaattaattaagaaacactcgaattaattaagaaactgcggcgcgccatgcttcatcagactct

SEQ ID NO: 12005 - DNA, 191 bp, Artificial Sequence; identical to SEQ ID NO: 12004
  Synthetic polynucleotide

SEQ ID NO: 12006 - DNA, 185 bp, Artificial Sequence
  Synthetic polynucleotide
atcatctcaccttgcctcctggtgaattagctcgagaccctgcaggatgagctaattaccgtagaatgagctaattaccgttcgatgagctaattaccgtgacatgagctaattaccgtctaatgagctaattaccgtactatgagctaattaccgttgcggcgcgccatgcttcatcagactct

SEQ ID NO: 12007 - DNA, 185 bp, Artificial Sequence; identical to SEQ ID NO: 12006
  Synthetic polynucleotide

SEQ ID NO: 12008 - DNA, 164 bp, Artificial Sequence
  Synthetic polynucleotide
atcatctcaccttgcctcctgacttgttccatttgtcacctgcagggctgattggagagctgattggtcggctgattgggacgctgattggctagctgattggactgctgattggtgcgctgattgggtagctgattggggcgcgccatgcttcatcagactct

SEQ ID NO: 12009 - DNA, 164 bp, Artificial Sequence; identical to SEQ ID NO: 12008
  Synthetic polynucleotide

SEQ ID NO: 12010 - DNA, 156 bp, Artificial Sequence
  Synthetic polynucleotide
atcatctcaccttgcctcctgcatgtgcgaggatgcagcctgcaggtaattagaagataattagatcgtaattagagactaattagactataattagaacttaattagatgctaattagagtataattagaggcgcgccatgcttcatcagactct

SEQ ID NO: 12011 - DNA, 156 bp, Artificial Sequence; identical to SEQ ID NO: 12010
  Synthetic polynucleotide

SEQ ID NO: 12012 - DNA, 172 bp, Artificial Sequence
  Synthetic polynucleotide
atcatctcaccttgcctcctggtttcgcgctgacaccacctgcagggccaatcagaagagccaatcagatcggccaatcagagacgccaatcagactagccaatcagaactgccaatcagatgcgccaatcagagtagccaatcagaggcgcgccatgcttcatcagactct

SEQ ID NO: 12013 - DNA, 172 bp, Artificial Sequence; identical to SEQ ID NO: 12012
  Synthetic polynucleotide

SEQ ID NO: 12014 - DNA, 172 bp, Artificial Sequence
  Synthetic polynucleotide
atcatctcaccttgcctcctgtccctaatgccatcagacctgcaggaacatatgtcagaaacatatgtctcgaacatatgtcgacaacatatgtcctaaacatatgtcactaacatatgtctgcaacatatgtcgtaaacatatgtcggcgcgccatgcttcatcagactct

SEQ ID NO: 12015 - DNA, 172 bp, Artificial Sequence; identical to SEQ ID NO: 12014
  Synthetic polynucleotide

SEQ ID NO: 12016 - DNA, 156 bp, Artificial Sequence
  Synthetic polynucleotide
atcatctcaccttgcctcctgcgtacgttcgttcttcgcctgcaggattaatccagaattaatcctcgattaatccgacattaatccctaattaatccactattaatcctgcattaatccgtaattaatccggcgcgccatgcttcatcagactct

SEQ ID NO: 12017 - DNA, 156 bp, Artificial Sequence; identical to SEQ ID NO: 12016
  Synthetic polynucleotide

SEQ ID NO: 12018 - DNA, 156 bp, Artificial Sequence
  Synthetic polynucleotide
atcatctcaccttgcctcctgacagggcctccagaacacctgcaggttgaccttagattgacctttcgttgaccttgacttgaccttctattgaccttactttgacctttgcttgaccttgtattgaccttggcgcgccatgcttcatcagactct

SEQ ID NO: 12019 - DNA, 156 bp, Artificial Sequence; identical to SEQ ID NO: 12018
  Synthetic polynucleotide

SEQ ID NO: 12020 - DNA, 156 bp, Artificial Sequence
  Synthetic polynucleotide
atcatctcaccttgcctcctgagagtcatccgactcatcctgcaggtaattagtagataattagttcgtaattagtgactaattagtctataattagtacttaattagttgctaattagtgtataattagtggcgcgccatgcttcatcagactct

SEQ ID NO: 12021 - DNA, 156 bp, Artificial Sequence; identical to SEQ ID NO: 12020
  Synthetic polynucleotide

SEQ ID NO: 12022 - DNA, 164 bp, Artificial Sequence
  Synthetic polynucleotide
atcatctcaccttgcctcctgggcgctggtaatctagccctgcagggaccacccaagagaccacccatcggaccacccagacgaccacccactagaccacccaactgaccacccatgcgaccacccagtagaccacccaggcgcgccatgcttcatcagactct

SEQ ID NO: 12023 - DNA, 164 bp, Artificial Sequence; identical to SEQ ID NO: 12022
  Synthetic polynucleotide

SEQ ID NO: 12024 - DNA, 164 bp, Artificial Sequence
  Synthetic polynucleotide
atcatctcaccttgcctcctgggtgaggtaatgtcgcccctgcagggaccaccccagagaccacccctcggaccaccccgacgaccaccccctagaccaccccactgaccacccctgcgaccaccccgtagaccaccccggcgcgccatgcttcatcagactct

SEQ ID NO: 12025 - DNA, 164 bp, Artificial Sequence; identical to SEQ ID NO: 12024
  Synthetic polynucleotide

SEQ ID NO: 12026 - DNA, 156 bp, Artificial Sequence
  Synthetic polynucleotide
atcatctcaccttgcctcctgaccctgtatggcccagtcctgcagggcacgtccagagcacgtcctcggcacgtccgacgcacgtccctagcacgtccactgcacgtcctgcgcacgtccgtagcacgtccggcgcgccatgcttcatcagactct

SEQ ID NO: 12027 - DNA, 156 bp, Artificial Sequence; identical to SEQ ID NO: 12026
  Synthetic polynucleotide

SEQ ID NO: 12028 - DNA, 191 bp, Artificial Sequence
  Synthetic polynucleotide
atcatctcaccttgcctcctggtattatactggcggctcctgcagggaacaatggtattgttcagagaacaatggtattgttctcggaacaatggtattgttcgacgaacaatggtattgttcctagaacaatggtattgttcactgaacaatggtattgttctgcggcgcgccatgcttcatcagactct

SEQ ID NO: 12029 - DNA, 191 bp, Artificial Sequence; identical to SEQ ID NO: 12028
  Synthetic polynucleotide

SEQ ID NO: 12030 - DNA, 191 bp, Artificial Sequence
  Synthetic polynucleotide
atcatctcaccttgcctcctgtaatgccgtcttcttgacctgcaggtatggggtatctatttaagatatggggtatctatttatcgtatggggtatctatttagactatggggtatctatttactatatggggtatctatttaacttatggggtatctatttatgcggcgcgccatgcttcatcagactct

SEQ ID NO: 12031 - DNA, 191 bp, Artificial Sequence; identical to SEQ ID NO: 12030
  Synthetic polynucleotide

SEQ ID NO: 12032 - DNA, 197 bp, Artificial Sequence
  Synthetic polynucleotide
atcatctcaccttgcctcctgtgcaaagcatcgaacatcctgcaggcgtcacgcttgactgctcagacgtcacgcttgactgctctcgcgtcacgcttgactgctcgaccgtcacgcttgactgctcctacgtcacgcttgactgctcactcgtcacgcttgactgctctgcggcgcgccatgcttcatcagactct

SEQ ID NO: 12033 - DNA, 197 bp, Artificial Sequence; identical to SEQ ID NO: 12032
  Synthetic polynucleotide

SEQ ID NO: 12034 - DNA, 190 bp, Artificial Sequence
  Synthetic polynucleotide
atcatctcaccttgcctcctgagtggtgtgtcggatggcctgcagggctgccccctggtgagagctgccccctggtgtcggctgccccctggtggacgctgccccctggtgctagctgccccctggtgactgctgccccctggtgtgcgctgccccctggtggtaggcgcgccatgcttcatcagactct

SEQ ID NO: 12035 - DNA, 190 bp, Artificial Sequence; identical to SEQ ID NO: 12034
  Synthetic polynucleotide

SEQ ID NO: 12036 - DNA, 164 bp, Artificial Sequence
  Synthetic polynucleotide
atcatctcaccttgcctcctgtcgataaggagaatcaacctgcaggaaagtgataagaaaagtgatatcgaaagtgatagacaaagtgatactaaaagtgataactaaagtgatatgcaaagtgatagtaaaagtgataggcgcgccatgcttcatcagactct

SEQ ID NO: 12037 - DNA, 164 bp, Artificial Sequence; identical to SEQ ID NO: 12036
  Synthetic polynucleotide

SEQ ID NO: 12038 - DNA, 156 bp, Artificial Sequence
  Synthetic polynucleotide
atcatctcaccttgcctcctgcaaggacgctcattatgcctgcaggtgtcaaaaagatgtcaaaatcgtgtcaaaagactgtcaaaactatgtcaaaaacttgtcaaaatgctgtcaaaagtatgtcaaaaggcgcgccatgcttcatcagactct

SEQ ID NO: 12039 - DNA, 156 bp, Artificial Sequence; identical to SEQ ID NO: 12038
  Synthetic polynucleotide

SEQ ID NO: 12040 - DNA, 180 bp, Artificial Sequence
  Synthetic polynucleotide
atcatctcaccttgcctcctgattatctgttgtccttgcctgcaggggttttattggagaggttttattggtcgggttttattgggacggttttattggctaggttttattggactggttttattggtgcggttttattgggtaggttttattggggcgcgccatgcttcatcagactct

SEQ ID NO: 12041 - DNA, 180 bp, Artificial Sequence; identical to SEQ ID NO: 12040
  Synthetic polynucleotide

SEQ ID NO: 12042 - DNA, 197 bp, Artificial Sequence
  Synthetic polynucleotide
atcatctcaccttgcctcctgaagacgtaactgggacgcctgcaggttttgttacagtgtcagattttgttacagtgtctcgttttgttacagtgtcgacttttgttacagtgtcctattttgttacagtgtcactttttgttacagtgtctgcttttgttacagtgtcgtaggcgcgccatgcttcatcagactct

SEQ ID NO: 12043 - DNA, 197 bp, Artificial Sequence; identical to SEQ ID NO: 12042
  Synthetic polynucleotide

SEQ ID NO: 12044 - DNA, 191 bp, Artificial Sequence
  Synthetic polynucleotide
atcatctcaccttgcctcctgtccctttcaaggaactgcctgcaggacattcctgacattccaagaacattcctgacattccatcgacattcctgacattccagacacattcctgacattccactaacattcctgacattccaactacattcctgacattccatgcggcgcgccatgcttcatcagactct

SEQ ID NO: 12045 - DNA, 191 bp, Artificial Sequence; identical to SEQ ID NO: 12044
  Synthetic polynucleotide

SEQ ID NO: 12046 - DNA, 188 bp, Artificial Sequence
  Synthetic polynucleotide
atcatctcaccttgcctcctgccgaaagagcaacacatcctgcaggatgcataatttaagaatgcataatttatcgatgcataatttagacatgcataatttactaatgcataatttaactatgcataatttatgcatgcataatttagtaatgcataatttaggcgcgccatgcttcatcagactct

SEQ ID NO: 12047 - DNA, 188 bp, Artificial Sequence; identical to SEQ ID NO: 12046
  Synthetic polynucleotide

SEQ ID NO: 12048 - DNA, 156 bp, Artificial Sequence
  Synthetic polynucleotide
atcatctcaccttgcctcctgacgttacgccgtccaaacctgcagggcgaggttagagcgaggtttcggcgaggttgacgcgaggttctagcgaggttactgcgaggtttgcgcgaggttgtagcgaggttggcgcgccatgcttcatcagactct

SEQ ID NO: 12049 - DNA, 156 bp, Artificial Sequence; identical to SEQ ID NO: 12048
  Synthetic polynucleotide

SEQ ID NO: 12050 - DNA, 197 bp, Artificial Sequence
  Synthetic polynucleotide
atcatctcaccttgcctcctgaccctataatatcgcttcctgcaggcgttgcctagcaacgagacgttgcctagcaacgtcgcgttgcctagcaacggaccgttgcctagcaacgctacgttgcctagcaacgactcgttgcctagcaacgtgccgttgcctagcaacggtaggcgcgccatgcttcatcagactct

SEQ ID NO: 12051 - DNA, 197 bp, Artificial Sequence; identical to SEQ ID NO: 12050
  Synthetic polynucleotide

SEQ ID NO: 12052 - DNA, 188 bp, Artificial Sequence
  Synthetic polynucleotide
atcatctcaccttgcctcctgtcccgtggccaactaaacctgcaggcgaccatctgttagacgaccatctgtttcgcgaccatctgttgaccgaccatctgttctacgaccatctgttactcgaccatctgtttgccgaccatctgttgtacgaccatctgttggcgcgccatgcttcatcagactct

SEQ ID NO: 12053 - DNA, 188 bp, Artificial Sequence; identical to SEQ ID NO: 12052
  Synthetic polynucleotide

SEQ ID NO: 12054 - DNA, 164 bp, Artificial Sequence
  Synthetic polynucleotide
atcatctcaccttgcctcctggaattcacgaggtcgtacctgcaggggggattaaagaggggattaatcgggggattaagacggggattaactaggggattaaactggggattaatgcggggattaagtaggggattaaggcgcgccatgcttcatcagactct

SEQ ID NO: 12055 - DNA, 164 bp, Artificial Sequence; identical to SEQ ID NO: 12054
  Synthetic polynucleotide

SEQ ID NO: 12056 - DNA, 188 bp, Artificial Sequence
  Synthetic polynucleotide
atcatctcaccttgcctcctgctggccttctatatcgtcctgcagggcggcaggggagagagcggcaggggagtcggcggcaggggaggacgcggcaggggagctagcggcaggggagactgcggcaggggagtgcgcggcaggggaggtagcggcaggggagggcgcgccatgcttcatcagactct

SEQ ID NO: 12057 - DNA, 188 bp, Artificial Sequence; identical to SEQ ID NO: 12056
  Synthetic polynucleotide

SEQ ID NO: 12058 - DNA, 172 bp, Artificial Sequence
  Synthetic polynucleotide
atcatctcaccttgcctcctggcaagactcttgttggtcctgcaggctcaagtgctagactcaagtgcttcgctcaagtgctgacctcaagtgctctactcaagtgctactctcaagtgcttgcctcaagtgctgtactcaagtgctggcgcgccatgcttcatcagactct

SEQ ID NO: 12059 - DNA, 172 bp, Artificial Sequence; identical to SEQ ID NO: 12058
  Synthetic polynucleotide

SEQ ID NO: 12060 - DNA, 172 bp, Artificial Sequence
  Synthetic polynucleotide
atcatctcaccttgcctcctgatgagttggccttcttccctgcaggctcacaccttagactcacacctttcgctcacaccttgacctcacaccttctactcacaccttactctcacacctttgcctcacaccttgtactcacaccttggcgcgccatgcttcatcagactct

SEQ ID NO: 12061 - DNA, 172 bp, Artificial Sequence; identical to SEQ ID NO: 12060
  Synthetic polynucleotide

SEQ ID NO: 12062 - DNA, 164 bp, Artificial Sequence
  Synthetic polynucleotide
atcatctcaccttgcctcctgaacggagtgctgttaaccctgcaggttttattacagattttattactcgttttattacgacttttattacctattttattacactttttattactgcttttattacgtattttattacggcgcgccatgcttcatcagactct

SEQ ID NO: 12063 - DNA, 164 bp, Artificial Sequence; identical to SEQ ID NO: 12062
  Synthetic polynucleotide

SEQ ID NO: 12064 - DNA, 197 bp, Artificial Sequence
  Synthetic polynucleotide
atcatctcaccttgcctcctgcggttatgcaggtatgtcctgcagggaggatgagtcaccaagagaggatgagtcaccatcggaggatgagtcaccagacgaggatgagtcaccactagaggatgagtcaccaactgaggatgagtcaccatgcgaggatgagtcaccagtaggcgcgccatgcttcatcagactct

SEQ ID NO: 12065 - DNA, 197 bp, Artificial Sequence; identical to SEQ ID NO: 12064
  Synthetic polynucleotide

SEQ ID NO: 12066 - DNA, 191 bp, Artificial Sequence
  Synthetic polynucleotide
atcatctcaccttgcctcctgcactcactgaccattgacctgcaggaaaaaaaatcaataacaagacagaaaaaaaaatcaataacaagactcgaaaaaaaatcaataacaagacgacaaaaaaaatcaataacaagacctaaaaaaaaatcaataacaagacactggcgcgccatgcttcatcagactct

SEQ ID NO: 12067 - DNA, 191 bp, Artificial Sequence; identical to SEQ ID NO: 12066
  Synthetic polynucleotide

SEQ ID NO: 12068 - DNA, 172 bp, Artificial Sequence
  Synthetic polynucleotide
atcatctcaccttgcctcctggtggcgttaggaattcccctgcaggcttaagtgctagacttaagtgcttcgcttaagtgctgaccttaagtgctctacttaagtgctactcttaagtgcttgccttaagtgctgtacttaagtgctggcgcgccatgcttcatcagactct

SEQ ID NO: 12069 - DNA, 172 bp, Artificial Sequence; identical to SEQ ID NO: 12068
  Synthetic polynucleotide

SEQ ID NO: 12070 - DNA, 164 bp, Artificial Sequence
  Synthetic polynucleotide
atcatctcaccttgcctcctggctgatcttccgataaccctgcaggtggggggtcagatggggggtctcgtggggggtcgactggggggtcctatggggggtcacttggggggtctgctggggggtcgtatggggggtcggcgcgccatgcttcatcagactct

SEQ ID NO: 12071 - DNA, 164 bp, Artificial Sequence; identical to SEQ ID NO: 12070
  Synthetic polynucleotide

SEQ ID NO: 12072 - DNA, 191 bp, Artificial Sequence
  Synthetic polynucleotide
atcatctcaccttgcctcctggaaacccggattccagccctgcaggcattaattatgcatgagagacattaattatgcatgagtcgcattaattatgcatgaggaccattaattatgcatgagctacattaattatgcatgagactcattaattatgcatgagtgcggcgcgccatgcttcatcagactct

SEQ ID NO: 12073 - DNA, 191 bp, Artificial Sequence; identical to SEQ ID NO: 12072
  Synthetic polynucleotide

SEQ ID NO: 12074 - DNA, 197 bp, Artificial Sequence
  Synthetic polynucleotide
atcatctcaccttgcctcctgcactctatcgactaagacctgcaggacagtcatgcgtgagttaagaacagtcatgcgtgagttatcgacagtcatgcgtgagttagacacagtcatgcgtgagttactaacagtcatgcgtgagttaactacagtcatgcgtgagttatgcggcgcgccatgcttcatcagactct

SEQ ID NO: 12075 - DNA, 197 bp, Artificial Sequence; identical to SEQ ID NO: 12074
  Synthetic polynucleotide

SEQ ID NO: 12076 - DNA, 164 bp, Artificial Sequence
  Synthetic polynucleotide
atcatctcaccttgcctcctgctaactgagagagcccacctgcagggtacgtgacagagtacgtgactcggtacgtgacgacgtacgtgacctagtacgtgacactgtacgtgactgcgtacgtgacgtagtacgtgacggcgcgccatgcttcatcagactct

SEQ ID NO: 12077 - DNA, 164 bp, Artificial Sequence; identical to SEQ ID NO: 12076
  Synthetic polynucleotide

SEQ ID NO: 12078 - DNA, 172 bp, Artificial Sequence
  Synthetic polynucleotide
atcatctcaccttgcctcctggctgatttatactatggcctgcaggaaggggggcaagaaaggggggcatcgaaggggggcagacaaggggggcactaaaggggggcaactaaggggggcatgcaaggggggcagtaaaggggggcaggcgcgccatgcttcatcagactct

SEQ ID NO: 12079 - DNA, 172 bp, Artificial Sequence; identical to SEQ ID NO: 12078
  Synthetic polynucleotide

SEQ ID NO: 12080 - DNA, 186 bp, Artificial Sequence
  Synthetic polynucleotide
atcatctcaccttgcctcctgcggcttgggatttgtgtcctgcaggagggacgcagctgctccccaagaagggacgcagctgctccccatcgagggacgcagctgctccccagacagggacgcagctgctccccactaagggacgcagctgctccccaactggcgcgccatgcttcatcagactct

SEQ ID NO: 12081 - DNA, 186 bp, Artificial Sequence; identical to SEQ ID NO: 12080
  Synthetic polynucleotide

SEQ ID NO: 12082 - DNA, 186 bp, Artificial Sequence
  Synthetic polynucleotide
atcatctcaccttgcctcctgcccgaagtgcagttgctcctgcaggtgacctcaatttgacctttgagatgacctcaatttgacctttgtcgtgacctcaatttgacctttggactgacctcaatttgacctttgctatgacctcaatttgacctttgactggcgcgccatgcttcatcagactct

SEQ ID NO: 12083 - DNA, 186 bp, Artificial Sequence; identical to SEQ ID NO: 12082
  Synthetic polynucleotide

SEQ ID NO: 12084 - DNA, 188 bp, Artificial Sequence
  Synthetic polynucleotide
atcatctcaccttgcctcctgtagatgccaagttgcgccctgcaggtgccacgtaatcagatgccacgtaatctcgtgccacgtaatcgactgccacgtaatcctatgccacgtaatcacttgccacgtaatctgctgccacgtaatcgtatgccacgtaatcggcgcgccatgcttcatcagactct

SEQ ID NO: 12085 - DNA, 188 bp, Artificial Sequence; identical to SEQ ID NO: 12084
  Synthetic polynucleotide

SEQ ID NO: 12086 - DNA, 197 bp, Artificial Sequence
  Synthetic polynucleotide
atcatctcaccttgcctcctgcggcacagagcacttcacctgcaggtgaaatgtttatttaagatgaaatgtttatttatcgtgaaatgtttatttagactgaaatgtttatttactatgaaatgtttatttaacttgaaatgtttatttatgctgaaatgtttatttagtaggcgcgccatgcttcatcagactct

SEQ ID NO: 12087 - DNA, 197 bp, Artificial Sequence; identical to SEQ ID NO: 12086
  Synthetic polynucleotide

SEQ ID NO: 12088 - DNA, 164 bp, Artificial Sequence
  Synthetic polynucleotide
atcatctcaccttgcctcctgttcagcgccgaagactgcctgcaggttcaaggacagattcaaggactcgttcaaggacgacttcaaggacctattcaaggacactttcaaggactgcttcaaggacgtattcaaggacggcgcgccatgcttcatcagactct

SEQ ID NO: 12089 - DNA, 164 bp, Artificial Sequence; identical to SEQ ID NO: 12088
  Synthetic polynucleotide

SEQ ID NO: 12090 - DNA, 200 bp, Artificial Sequence
  Synthetic polynucleotide
atcatctcaccttgcctcctgcaagtcgcgaaccgaaccctgcaggacagggtcaaaggtcacgaagaacagggtcaaaggtcacgatcgacagggtcaaaggtcacgagacacagggtcaaaggtcacgactaacagggtcaaaggtcacgaactacagggtcaaaggtcacgaggcgcgccatgcttcatcagactct

SEQ ID NO: 12091 - DNA, 200 bp, Artificial Sequence; identical to SEQ ID NO: 12090
  Synthetic polynucleotide

SEQ ID NO: 12092 - DNA, 196 bp, Artificial Sequence
  Synthetic polynucleotide
atcatctcaccttgcctcctgcggagggacataagcttcctgcaggtttcaaggcccccagatttcaaggccccctcgtttcaaggcccccgactttcaaggcccccctatttcaaggcccccacttttcaaggccccctgctttcaaggcccccgtatttcaaggcccccggcgcgccatgcttcatcagactct

SEQ ID NO: 12093 - DNA, 196 bp, Artificial Sequence; identical to SEQ ID NO: 12092
  Synthetic polynucleotide

SEQ ID NO: 12094 - DNA, 185 bp, Artificial Sequence
  Synthetic polynucleotide
atcatctcaccttgcctcctggtttaaccacccaagagcctgcaggtgaacccgatgaactcagatgaacccgatgaactctcgtgaacccgatgaactcgactgaacccgatgaactcctatgaacccgatgaactcacttgaacccgatgaactctgcggcgcgccatgcttcatcagactct

SEQ ID NO: 12095 - DNA, 185 bp, Artificial Sequence; identical to SEQ ID NO: 12094
  Synthetic polynucleotide

SEQ ID NO: 12096 - DNA, 191 bp, Artificial Sequence
  Synthetic polynucleotide
atcatctcaccttgcctcctgtgctgcagtccttcaagcctgcaggctggcgccccctggtggagactggcgccccctggtggtcgctggcgccccctggtgggacctggcgccccctggtggctactggcgccccctggtggactctggcgccccctggtggtgcggcgcgccatgcttcatcagactct

SEQ ID NO: 12097 - DNA, 191 bp, Artificial Sequence; identical to SEQ ID NO: 12096
  Synthetic polynucleotide

SEQ ID NO: 12098 - DNA, 164 bp, Artificial Sequence
  Synthetic polynucleotide
atcatctcaccttgcctcctggggaggtgtatatgtttcctgcaggcatataaggagacatataaggtcgcatataagggaccatataaggctacatataaggactcatataaggtgccatataagggtacatataaggggcgcgccatgcttcatcagactct

SEQ ID NO: 12099 - DNA, 164 bp, Artificial Sequence; identical to SEQ ID NO: 12098
  Synthetic polynucleotide

SEQ ID NO: 12100 - DNA, 197 bp, Artificial Sequence
  Synthetic polynucleotide
atcatctcaccttgcctcctgacaccttgaccagatctcctgcaggttcagtttcactttcagattcagtttcactttctcgttcagtttcactttcgacttcagtttcactttcctattcagtttcactttcactttcagtttcactttctgcttcagtttcactttcgtaggcgcgccatgcttcatcagactct

SEQ ID NO: 12101 - DNA, 197 bp, Artificial Sequence; identical to SEQ ID NO: 12100
  Synthetic polynucleotide

SEQ ID NO: 12102 - DNA, 188 bp, Artificial Sequence
  Synthetic polynucleotide
atcatctcaccttgcctcctgtcttcaggctttgctgacctgcaggaaccacttcctgagaaaccacttcctgtcgaaccacttcctggacaaccacttcctgctaaaccacttcctgactaaccacttcctgtgcaaccacttcctggtaaaccacttcctgggcgcgccatgcttcatcagactct

SEQ ID NO: 12103 - DNA, 188 bp, Artificial Sequence; identical to SEQ ID NO: 12102
  Synthetic polynucleotide

SEQ ID NO: 12104 - DNA, 172 bp, Artificial Sequence
  Synthetic polynucleotide
atcatctcaccttgcctcctgggttcattatgctgtatcctgcagggtggggggtaagagtggggggtatcggtggggggtagacgtggggggtactagtggggggtaactgtggggggtatgcgtggggggtagtagtggggggtaggcgcgccatgcttcatcagactct

SEQ ID NO: 12105 - DNA, 172 bp, Artificial Sequence; identical to SEQ ID NO: 12104
  Synthetic polynucleotide

SEQ ID NO: 12106 - DNA, 164 bp, Artificial Sequence
  Synthetic polynucleotide
atcatctcaccttgcctcctgagttcgtacggctcagacctgcaggggtcacgtgagaggtcacgtgtcgggtcacgtggacggtcacgtgctaggtcacgtgactggtcacgtgtgcggtcacgtggtaggtcacgtgggcgcgccatgcttcatcagactct

SEQ ID NO: 12107 - DNA, 164 bp, Artificial Sequence; identical to SEQ ID NO: 12106
  Synthetic polynucleotide

SEQ ID NO: 12108 - DNA, 156 bp, Artificial Sequence
  Synthetic polynucleotide
atcatctcaccttgcctcctggttgccgctcattgttgcctgcaggaggggtcaagaaggggtcatcgaggggtcagacaggggtcactaaggggtcaactaggggtcatgcaggggtcagtaaggggtcaggcgcgccatgcttcatcagactct

SEQ ID NO: 12109 - DNA, 156 bp, Artificial Sequence; identical to SEQ ID NO: 12108
  Synthetic polynucleotide

SEQ ID NO: 12110 - DNA, 156 bp, Artificial Sequence
  Synthetic polynucleotide
atcatctcaccttgcctcctgcacctcatcgtaggtggcctgcagggaacaataagagaacaatatcggaacaatagacgaacaatactagaacaataactgaacaatatgcgaacaatagtagaacaataggcgcgccatgcttcatcagactct

SEQ ID NO: 12111 - DNA, 156 bp, Artificial Sequence; identical to SEQ ID NO: 12110
  Synthetic polynucleotide

SEQ ID NO: 12112 - DNA, 188 bp, Artificial Sequence
  Synthetic polynucleotide
atcatctcaccttgcctcctgaagacagcttcgtcgtacctgcagggacctgtcactgagagacctgtcactgtcggacctgtcactggacgacctgtcactgctagacctgtcactgactgacctgtcactgtgcgacctgtcactggtagacctgtcactgggcgcgccatgcttcatcagactct

SEQ ID NO: 12113 - DNA, 188 bp, Artificial Sequence; identical to SEQ ID NO: 12112
  Synthetic polynucleotide

SEQ ID NO: 12114 - DNA, 191 bp, Artificial Sequence
  Synthetic polynucleotide
atcatctcaccttgcctcctgttcgtgacccagcagctcctgcaggaaaacgaaaatcgatttagaaaaacgaaaatcgattttcgaaaacgaaaatcgatttgacaaaacgaaaatcgatttctaaaaacgaaaatcgatttactaaaacgaaaatcgattttgcggcgcgccatgcttcatcagactct

SEQ ID NO: 12115 - DNA, 191 bp, Artificial Sequence; identical to SEQ ID NO: 12114
  Synthetic polynucleotide

SEQ ID NO: 12116 - DNA, 164 bp, Artificial Sequence
  Synthetic polynucleotide
atcatctcaccttgcctcctgtcgggacgtatgtttctcctgcagggcctggaatagagcctggaattcggcctggaatgacgcctggaatctagcctggaatactgcctggaattgcgcctggaatgtagcctggaatggcgcgccatgcttcatcagactct

SEQ ID NO: 12117 - DNA, 164 bp, Artificial Sequence; identical to SEQ ID NO: 12116
  Synthetic polynucleotide

SEQ ID NO: 12118 - DNA, 191 bp, Artificial Sequence
  Synthetic polynucleotide
atcatctcaccttgcctcctgtttgcgcggtacttccacctgcaggtatagagataagaattgagatatagagataagaattgtcgtatagagataagaattggactatagagataagaattgctatatagagataagaattgacttatagagataagaattgtgcggcgcgccatgcttcatcagactct

SEQ ID NO: 12119 - DNA, 191 bp, Artificial Sequence; identical to SEQ ID NO: 12118
  Synthetic polynucleotide

SEQ ID NO: 12120 - DNA, 156 bp, Artificial Sequence
  Synthetic polynucleotide
atcatctcaccttgcctcctgtccgtagtaaagagaatcctgcagggaacaatgagagaacaatgtcggaacaatggacgaacaatgctagaacaatgactgaacaatgtgcgaacaatggtagaacaatgggcgcgccatgcttcatcagactct

SEQ ID NO: 12121 - DNA, 156 bp, Artificial Sequence; identical to SEQ ID NO: 12120
  Synthetic polynucleotide

SEQ ID NO: 12122 - DNA, 185 bp, Artificial Sequence
  Synthetic polynucleotide
atcatctcaccttgcctcctgtcggtctatccctgctacctgcaggatgactgcacattcatagaatgactgcacattcattcgatgactgcacattcatgacatgactgcacattcatctaatgactgcacattcatactatgactgcacattcattgcggcgcgccatgcttcatcagactct

SEQ ID NO: 12123 - DNA, 185 bp, Artificial Sequence; identical to SEQ ID NO: 12122
  Synthetic polynucleotide

SEQ ID NO: 12124 - DNA, 187 bp, Artificial Sequence
  Synthetic polynucleotide
atcatctcaccttgcctcctggatcgaccaagtctgtacctgcaggttattaattggttataatggttaaatagattattaattggttataatggttaaattcgttattaattggttataatggttaaatgacttattaattggttataatggttaaatctaggcgcgccatgcttcatcagactct

SEQ ID NO: 12125 - DNA, 187 bp, Artificial Sequence; identical to SEQ ID NO: 12124
  Synthetic polynucleotide

SEQ ID NO: 12126 - DNA, 190 bp, Artificial Sequence
  Synthetic polynucleotide
atcatctcaccttgcctcctgcctagaaggatacagagcctgcaggcaaatctcgcgagaagacaaatctcgcgagatcgcaaatctcgcgagagaccaaatctcgcgagactacaaatctcgcgagaactcaaatctcgcgagatgccaaatctcgcgagagtaggcgcgccatgcttcatcagactct

SEQ ID NO: 12127 - DNA, 190 bp, Artificial Sequence; identical to SEQ ID NO: 12126
  Synthetic polynucleotide

SEQ ID NO: 12128 - DNA, 191 bp, Artificial Sequence
  Synthetic polynucleotide
atcatctcaccttgcctcctggggtgttgagctaagtacctgcaggcattattaattaattcgagacattattaattaattcgtcgcattattaattaattcggaccattattaattaattcgctacattattaattaattcgactcattattaattaattcgtgcggcgcgccatgcttcatcagactct

SEQ ID NO: 12129 - DNA, 191 bp, Artificial Sequence; identical to SEQ ID NO: 12128
  Synthetic polynucleotide

SEQ ID NO: 12130 - DNA, 188 bp, Artificial Sequence
  Synthetic polynucleotide
atcatctcaccttgcctcctgctaggtagtttacagcgcctgcaggctgcacctggcgagactgcacctggcgtcgctgcacctggcggacctgcacctggcgctactgcacctggcgactctgcacctggcgtgcctgcacctggcggtactgcacctggcgggcgcgccatgcttcatcagactct

SEQ ID NO: 12131 - DNA, 188 bp, Artificial Sequence; identical to SEQ ID NO: 12130
  Synthetic polynucleotide

SEQ ID NO: 12132 - DNA, 172 bp, Artificial Sequence
  Synthetic polynucleotide
atcatctcaccttgcctcctgagaggccgttaacgtgccctgcaggccatagcaacagaccatagcaactcgccatagcaacgacccatagcaacctaccatagcaacactccatagcaactgcccatagcaacgtaccatagcaacggcgcgccatgcttcatcagactct

SEQ ID NO: 12133 - DNA, 172 bp, Artificial Sequence; identical to SEQ ID NO: 12132
  Synthetic polynucleotide

SEQ ID NO: 12134 - DNA, 172 bp, Artificial Sequence
  Synthetic polynucleotide
atcatctcaccttgcctcctgatgttcaacggactgggcctgcaggaggaaaatttagaaggaaaattttcgaggaaaatttgacaggaaaatttctaaggaaaatttactaggaaaattttgcaggaaaatttgtaaggaaaatttggcgcgccatgcttcatcagactct

SEQ ID NO: 12135 - DNA, 172 bp, Artificial Sequence; identical to SEQ ID NO: 12134
  Synthetic polynucleotide

SEQ ID NO: 12136 - DNA, 196 bp, Artificial Sequence
  Synthetic polynucleotide
atcatctcaccttgcctcctgcttggtgtatgggttgtcctgcagggggcgctgtccatggtgctgaaagagggcgctgtccatggtgctgaatcggggcgctgtccatggtgctgaagacgggcgctgtccatggtgctgaactagggcgctgtccatggtgctgaaactggcgcgccatgcttcatcagactct

SEQ ID NO: 12137 - DNA, 196 bp, Artificial Sequence; identical to SEQ ID NO: 12136
  Synthetic polynucleotide

SEQ ID NO: 12138 - DNA, 191 bp, Artificial Sequence
  Synthetic polynucleotide
atcatctcaccttgcctcctgaatccttctgtagattccctgcaggtgcgatgatttcgccttagatgcgatgatttcgcctttcgtgcgatgatttcgccttgactgcgatgatttcgccttctatgcgatgatttcgccttacttgcgatgatttcgcctttgcggcgcgccatgcttcatcagactct

SEQ ID NO: 12139 - DNA, 191 bp, Artificial Sequence; identical to SEQ ID NO: 12138
  Synthetic polynucleotide

SEQ ID NO: 12140 - DNA, 188 bp, Artificial Sequence
  Synthetic polynucleotide
atcatctcaccttgcctcctgatagtcgccgtacgatgcctgcagggatgatttatgaagagatgatttatgatcggatgatttatgagacgatgatttatgactagatgatttatgaactgatgatttatgatgcgatgatttatgagtagatgatttatgaggcgcgccatgcttcatcagactct

SEQ ID NO: 12141 - DNA, 188 bp, Artificial Sequence; identical to SEQ ID NO: 12140
  Synthetic polynucleotide

SEQ ID NO: 12142 - DNA, 196 bp, Artificial Sequence
  Synthetic polynucleotide
atcatctcaccttgcctcctgtttacgtaacctcctctcctgcaggccccaagtgaaggagaccccaagtgaaggtcgccccaagtgaagggacccccaagtgaaggctaccccaagtgaaggactccccaagtgaaggtgcccccaagtgaagggtaccccaagtgaaggggcgcgccatgcttcatcagactct

SEQ ID NO: 12143 - DNA, 196 bp, Artificial Sequence; identical to SEQ ID NO: 12142
  Synthetic polynucleotide

SEQ ID NO: 12144 - DNA, 172 bp, Artificial Sequence
  Synthetic polynucleotide
atcatctcaccttgcctcctgacttacaatattgcccacctgcaggggggaggaggagaggggaggaggtcgggggaggagggacggggaggaggctaggggaggaggactggggaggaggtgcggggaggagggtaggggaggaggggcgcgccatgcttcatcagactct

SEQ ID NO: 12145 - DNA, 172 bp, Artificial Sequence; identical to SEQ ID NO: 12144
  Synthetic polynucleotide

SEQ ID NO: 12146 - DNA, 197 bp, Artificial Sequence
  Synthetic polynucleotide
atcatctcaccttgcctcctgtatccggcggtgataggcctgcaggaccacttccgggtcaagaaccacttccgggtcatcgaccacttccgggtcagacaccacttccgggtcactaaccacttccgggtcaactaccacttccgggtcatgcaccacttccgggtcagtaggcgcgccatgcttcatcagactct

SEQ ID NO: 12147 - DNA, 197 bp, Artificial Sequence; identical to SEQ ID NO: 12146
  Synthetic polynucleotide

SEQ ID NO: 12148 - DNA, 185 bp, Artificial Sequence
  Synthetic polynucleotide
atcatctcaccttgcctcctgtccctcgtagcatactacctgcaggcggctgttaccctgggagacggctgttaccctgggtcgcggctgttaccctggggaccggctgttaccctgggctacggctgttaccctgggactcggctgttaccctgggtgcggcgcgccatgcttcatcagactct

SEQ ID NO: 12149 - DNA, 185 bp, Artificial Sequence; identical to SEQ ID NO: 12148
  Synthetic polynucleotide

SEQ ID NO: 12150 - DNA, 180 bp, Artificial Sequence
  Synthetic polynucleotide
atcatctcaccttgcctcctgcacagactcacccaccacctgcaggcatgactcatcagacatgactcatctcgcatgactcatcgaccatgactcatcctacatgactcatcactcatgactcatctgccatgactcatcgtacatgactcatcggcgcgccatgcttcatcagactct

SEQ ID NO: 12151 - DNA, 180 bp, Artificial Sequence; identical to SEQ ID NO: 12150
  Synthetic polynucleotide

SEQ ID NO: 12152 - DNA, 185 bp, Artificial Sequence
  Synthetic polynucleotide
atcatctcaccttgcctcctggaatagctgttcctgcccctgcaggatcagccaatcagagcagaatcagccaatcagagctcgatcagccaatcagagcgacatcagccaatcagagcctaatcagccaatcagagcactatcagccaatcagagctgcggcgcgccatgcttcatcagactct

SEQ ID NO: 12153 - DNA, 185 bp, Artificial Sequence; identical to SEQ ID NO: 12152
  Synthetic polynucleotide

SEQ ID NO: 12154 - DNA, 172 bp, Artificial Sequence
  Synthetic polynucleotide
atcatctcaccttgcctcctgtcctgggctgatccgaacctgcaggacttccccttagaacttcccctttcgacttccccttgacacttccccttctaacttccccttactacttcccctttgcacttccccttgtaacttccccttggcgcgccatgcttcatcagactct

SEQ ID NO: 12155 - DNA, 172 bp, Artificial Sequence; identical to SEQ ID NO: 12154
  Synthetic polynucleotide

SEQ ID NO: 12156 - DNA, 197 bp, Artificial Sequence
  Synthetic polynucleotide
atcatctcaccttgcctcctgagccgcgaactaatttccctgcaggcttatctgcccccaccagagacttatctgcccccaccagtcgcttatctgcccccaccaggaccttatctgcccccaccagctacttatctgcccccaccagactcttatctgcccccaccagtgcggcgcgccatgcttcatcagactct

SEQ ID NO: 12157 - DNA, 197 bp, Artificial Sequence; identical to SEQ ID NO: 12156
  Synthetic polynucleotide

SEQ ID NO: 12158 - DNA, 164 bp, Artificial Sequence
  Synthetic polynucleotide
atcatctcaccttgcctcctgacgcctgctgtttatggcctgcaggcatgtaattagacatgtaatttcgcatgtaattgaccatgtaattctacatgtaattactcatgtaatttgccatgtaattgtacatgtaattggcgcgccatgcttcatcagactct

SEQ ID NO: 12159 - DNA, 164 bp, Artificial Sequence; identical to SEQ ID NO: 12158
  Synthetic polynucleotide

SEQ ID NO: 12160 - DNA, 200 bp, Artificial Sequence
  Synthetic polynucleotide
atcatctcaccttgcctcctggggcacatagagattaacctgcaggggggtgaggttggattttgggttaatttttagaggggtgaggttggattttgggttaattttttcgggggtgaggttggattttgggttaatttttgacggggtgaggttggattttgggttaatttttggcgcgccatgcttcatcagactct

SEQ ID NO: 12161 - DNA, 200 bp, Artificial Sequence; identical to SEQ ID NO: 12160
  Synthetic polynucleotide

SEQ ID NO: 12162 - DNA, 190 bp, Artificial Sequence
  Synthetic polynucleotide
atcatctcaccttgcctcctgtacgctggttgttcgtccctgcaggctgggaaatcccctagactgggaaatccccttcgctgggaaatcccctgacctgggaaatcccctctactgggaaatcccctactctgggaaatccccttgcctgggaaatcccctgtaggcgcgccatgcttcatcagactct

SEQ ID NO: 12163 - DNA, 190 bp, Artificial Sequence; identical to SEQ ID NO: 12162
  Synthetic polynucleotide

SEQ ID NO: 12164 - DNA, 191 bp, Artificial Sequence
  Synthetic polynucleotide
atcatctcaccttgcctcctggagcggcaagctggaatcctgcaggagttgccttatatggtcagaagttgccttatatggtctcgagttgccttatatggtcgacagttgccttatatggtcctaagttgccttatatggtcactagttgccttatatggtctgcggcgcgccatgcttcatcagactct

SEQ ID NO: 12165 - DNA, 191 bp, Artificial Sequence; identical to SEQ ID NO: 12164
  Synthetic polynucleotide

SEQ ID NO: 12166 - DNA, 172 bp, Artificial Sequence
  Synthetic polynucleotide
atcatctcaccttgcctcctgcgatttagtcatggctacctgcaggatgactcattagaatgactcatttcgatgactcattgacatgactcattctaatgactcattactatgactcatttgcatgactcattgtaatgactcattggcgcgccatgcttcatcagactct

SEQ ID NO: 12167 - DNA, 172 bp, Artificial Sequence; identical to SEQ ID NO: 12166
  Synthetic polynucleotide

SEQ ID NO: 12168 - DNA, 172 bp, Artificial Sequence
  Synthetic polynucleotide
atcatctcaccttgcctcctggggcctcttacacgagacctgcagggcgccccctgagagcgccccctgtcggcgccccctggacgcgccccctgctagcgccccctgactgcgccccctgtgcgcgccccctggtagcgccccctgggcgcgccatgcttcatcagactct

SEQ ID NO: 12169 - DNA, 172 bp, Artificial Sequence; identical to SEQ ID NO: 12168
  Synthetic polynucleotide

SEQ ID NO: 12170 - DNA, 197 bp, Artificial Sequence
  Synthetic polynucleotide
atcatctcaccttgcctcctgtgtgcgtgagagcacgacctgcaggtttcacttcctctttagatttcacttcctcttttcgtttcacttcctctttgactttcacttcctctttctatttcacttcctctttacttttcacttcctcttttgctttcacttcctctttgtaggcgcgccatgcttcatcagactct

SEQ ID NO: 12171 - DNA, 197 bp, Artificial Sequence; identical to SEQ ID NO: 12170
  Synthetic polynucleotide

SEQ ID NO: 12172 - DNA, 156 bp, Artificial Sequence
  Synthetic polynucleotide
atcatctcaccttgcctcctgtgtcaccgaaggattcacctgcagggtgaaagtagagtgaaagttcggtgaaagtgacgtgaaagtctagtgaaagtactgtgaaagttgcgtgaaagtgtagtgaaagtggcgcgccatgcttcatcagactct

SEQ ID NO: 12173 - DNA, 156 bp, Artificial Sequence; identical to SEQ ID NO: 12172
  Synthetic polynucleotide

SEQ ID NO: 12174 - DNA, 180 bp, Artificial Sequence
  Synthetic polynucleotide
atcatctcaccttgcctcctgtcaggagttgaacggtacctgcaggatatgcaaattagaatatgcaaatttcgatatgcaaattgacatatgcaaattctaatatgcaaattactatatgcaaatttgcatatgcaaattgtaatatgcaaattggcgcgccatgcttcatcagactct

SEQ ID NO: 12175 - DNA, 180 bp, Artificial Sequence; identical to SEQ ID NO: 12174
  Synthetic polynucleotide

SEQ ID NO: 12176 - DNA, 172 bp, Artificial Sequence
  Synthetic polynucleotide
atcatctcaccttgcctcctgtcctaatcacgacgatccctgcaggcaattaatgaagacaattaatgatcgcaattaatgagaccaattaatgactacaattaatgaactcaattaatgatgccaattaatgagtacaattaatgaggcgcgccatgcttcatcagactct

SEQ ID NO: 12177 - DNA, 172 bp, Artificial Sequence; identical to SEQ ID NO: 12176
  Synthetic polynucleotide

SEQ ID NO: 12178 - DNA, 180 bp, Artificial Sequence
  Synthetic polynucleotide
atcatctcaccttgcctcctgtttaccggaagaaaccgcctgcagggcaggcgccgcagagcaggcgccgctcggcaggcgccgcgacgcaggcgccgcctagcaggcgccgcactgcaggcgccgctgcgcaggcgccgcgtagcaggcgccgcggcgcgccatgcttcatcagactct

SEQ ID NO: 12179 - DNA, 180 bp, Artificial Sequence; identical to SEQ ID NO: 12178
  Synthetic polynucleotide

SEQ ID NO: 12180 - DNA, 191 bp, Artificial Sequence
  Synthetic polynucleotide
atcatctcaccttgcctcctgagctgcaaaggaagctgcctgcaggaaagctaattagcgaaaagaaaagctaattagcgaaatcgaaagctaattagcgaaagacaaagctaattagcgaaactaaaagctaattagcgaaaactaaagctaattagcgaaatgcggcgcgccatgcttcatcagactct

SEQ ID NO: 12181 - DNA, 191 bp, Artificial Sequence; identical to SEQ ID NO: 12180
  Synthetic polynucleotide

SEQ ID NO: 12182 - DNA, 190 bp, Artificial Sequence
  Synthetic polynucleotide
atcatctcaccttgcctcctgccacggtattgataaaccctgcaggaatataaacatacaagaaatataaacatacatcgaatataaacatacagacaatataaacatacactaaatataaacatacaactaatataaacatacatgcaatataaacatacagtaggcgcgccatgcttcatcagactct

SEQ ID NO: 12183 - DNA, 190 bp, Artificial Sequence; identical to SEQ ID NO: 12182
  Synthetic polynucleotide

SEQ ID NO: 12184 - DNA, 200 bp, Artificial Sequence
  Synthetic polynucleotide
atcatctcaccttgcctcctgctgcgatatcactccctcctgcaggcatctccttatatggccatagacatctccttatatggccattcgcatctccttatatggccatgaccatctccttatatggccatctacatctccttatatggccatactcatctccttatatggccatggcgcgccatgcttcatcagactct

SEQ ID NO: 12185 - DNA, 200 bp, Artificial Sequence; identical to SEQ ID NO: 12184
  Synthetic polynucleotide

SEQ ID NO: 12186 - DNA, 180 bp, Artificial Sequence
  Synthetic polynucleotide
atcatctcaccttgcctcctgggtgagattcaggacctcctgcaggtgtttactttgagatgtttactttgtcgtgtttactttggactgtttactttgctatgtttactttgacttgtttactttgtgctgtttactttggtatgtttactttgggcgcgccatgcttcatcagactct

SEQ ID NO: 12187 - DNA, 180 bp, Artificial Sequence; identical to SEQ ID NO: 12186
  Synthetic polynucleotide

SEQ ID NO: 12188 - DNA, 188 bp, Artificial Sequence
  Synthetic polynucleotide
atcatctcaccttgcctcctgaacaaggtcatcagattcctgcagggccgccatcttgagagccgccatcttgtcggccgccatcttggacgccgccatcttgctagccgccatcttgactgccgccatcttgtgcgccgccatcttggtagccgccatcttgggcgcgccatgcttcatcagactct

SEQ ID NO: 12189 - DNA, 188 bp, Artificial Sequence; identical to SEQ ID NO: 12188
  Synthetic polynucleotide

SEQ ID NO: 12190 - DNA, 196 bp, Artificial Sequence
  Synthetic polynucleotide
atcatctcaccttgcctcctgcaatcgaacggtggaaacctgcaggaaaaatcaaaggtagaaaaaatcaaaggttcgaaaaatcaaaggtgacaaaaatcaaaggtctaaaaaatcaaaggtactaaaaatcaaaggttgcaaaaatcaaaggtgtaaaaaatcaaaggtggcgcgccatgcttcatcagactct

SEQ ID NO: 12191 - DNA, 196 bp, Artificial Sequence; identical to SEQ ID NO: 12190
  Synthetic polynucleotide

SEQ ID NO: 12192 - DNA, 197 bp, Artificial Sequence
  Synthetic polynucleotide
atcatctcaccttgcctcctgatcctattgccctgacgcctgcaggtgtgtataattatgaattagatgtgtataattatgaatttcgtgtgtataattatgaattgactgtgtataattatgaattctatgtgtataattatgaattacttgtgtataattatgaatttgcggcgcgccatgcttcatcagactct

SEQ ID NO: 12193 - DNA, 197 bp, Artificial Sequence; identical to SEQ ID NO: 12192
  Synthetic polynucleotide

SEQ ID NO: 12194 - DNA, 132 bp, Artificial Sequence
  Synthetic polynucleotide
atcatctcaccttgcctcctgtggagtagtccgaaagtcctgcaggtgataagatgatatcgtgatagactgatactatgataacttgatatgctgatagtatgataggcgcgccatgcttcatcagactct

SEQ ID NO: 12195 - DNA, 132 bp, Artificial Sequence; identical to SEQ ID NO: 12194
  Synthetic polynucleotide

SEQ ID NO: 12196 - DNA, 172 bp, Artificial Sequence
  Synthetic polynucleotide
atcatctcaccttgcctcctgctcaatggacctgagtgcctgcaggctcagctggtagactcagctggttcgctcagctggtgacctcagctggtctactcagctggtactctcagctggttgcctcagctggtgtactcagctggtggcgcgccatgcttcatcagactct

SEQ ID NO: 12197 - DNA, 172 bp, Artificial Sequence; identical to SEQ ID NO: 12196
  Synthetic polynucleotide

SEQ ID NO: 12198 - DNA, 180 bp, Artificial Sequence
  Synthetic polynucleotide
atcatctcaccttgcctcctgctgagcgacacataatgcctgcagggtgggtggtctagagtgggtggtcttcggtgggtggtctgacgtgggtggtctctagtgggtggtctactgtgggtggtcttgcgtgggtggtctgtagtgggtggtctggcgcgccatgcttcatcagactct

SEQ ID NO: 12199 - DNA, 180 bp, Artificial Sequence; identical to SEQ ID NO: 12198
  Synthetic polynucleotide

SEQ ID NO: 12200 - DNA, 172 bp, Artificial Sequence
  Synthetic polynucleotide
atcatctcaccttgcctcctgaccaatccgtttaggtacctgcaggatgactcatcagaatgactcatctcgatgactcatcgacatgactcatcctaatgactcatcactatgactcatctgcatgactcatcgtaatgactcatcggcgcgccatgcttcatcagactct

SEQ ID NO: 12201 - DNA, 172 bp, Artificial Sequence; identical to SEQ ID NO: 12200
  Synthetic polynucleotide

SEQ ID NO: 12202 - DNA, 172 bp, Artificial Sequence
  Synthetic polynucleotide
atcatctcaccttgcctcctgaggtagtgtctttatctcctgcaggatgactcataagaatgactcatatcgatgactcatagacatgactcatactaatgactcataactatgactcatatgcatgactcatagtaatgactcataggcgcgccatgcttcatcagactct

SEQ ID NO: 12203 - DNA, 172 bp, Artificial Sequence; identical to SEQ ID NO: 12202
  Synthetic polynucleotide

SEQ ID NO: 12204 - DNA, 172 bp, Artificial Sequence
  Synthetic polynucleotide
atcatctcaccttgcctcctgtgatcttcgactttgtgcctgcaggccgcccacgcagaccgcccacgctcgccgcccacgcgacccgcccacgcctaccgcccacgcactccgcccacgctgcccgcccacgcgtaccgcccacgcggcgcgccatgcttcatcagactct

SEQ ID NO: 12205 - DNA, 172 bp, Artificial Sequence; identical to SEQ ID NO: 12204
  Synthetic polynucleotide

SEQ ID NO: 12206 - DNA, 197 bp, Artificial Sequence
  Synthetic polynucleotide
atcatctcaccttgcctcctgctttaacggtttagtgccctgcaggacaggaagtgattgcagaacaggaagtgattgctcgacaggaagtgattgcgacacaggaagtgattgcctaacaggaagtgattgcactacaggaagtgattgctgcacaggaagtgattgcgtaggcgcgccatgcttcatcagactct

SEQ ID NO: 12207 - DNA, 197 bp, Artificial Sequence; identical to SEQ ID NO: 12206
  Synthetic polynucleotide

SEQ ID NO: 12208 - DNA, 188 bp, Artificial Sequence
  Synthetic polynucleotide
atcatctcaccttgcctcctggctgctattctactcctcctgcaggccccttgagtcaagaccccttgagtcatcgccccttgagtcagacccccttgagtcactaccccttgagtcaactccccttgagtcatgcccccttgagtcagtaccccttgagtcaggcgcgccatgcttcatcagactct

SEQ ID NO: 12209 - DNA, 188 bp, Artificial Sequence; identical to SEQ ID NO: 12208
  Synthetic polynucleotide

SEQ ID NO: 12210 - DNA, 172 bp, Artificial Sequence
  Synthetic polynucleotide
atcatctcaccttgcctcctgaatttgacctcctcccgcctgcaggggcacgtggtagaggcacgtggttcgggcacgtggtgacggcacgtggtctaggcacgtggtactggcacgtggttgcggcacgtggtgtaggcacgtggtggcgcgccatgcttcatcagactct

SEQ ID NO: 12211 - DNA, 172 bp, Artificial Sequence; identical to SEQ ID NO: 12210
  Synthetic polynucleotide

SEQ ID NO: 12212 - DNA, 191 bp, Artificial Sequence
  Synthetic polynucleotide
atcatctcaccttgcctcctggtcgaagtccagtccatcctgcaggaaaatgtaaacaaacagagaaaaatgtaaacaaacagtcgaaaatgtaaacaaacaggacaaaatgtaaacaaacagctaaaaatgtaaacaaacagactaaaatgtaaacaaacagtgcggcgcgccatgcttcatcagactct

SEQ ID NO: 12213 - DNA, 191 bp, Artificial Sequence; identical to SEQ ID NO: 12212
  Synthetic polynucleotide

SEQ ID NO: 12214 - DNA, 188 bp, Artificial Sequence
  Synthetic polynucleotide
atcatctcaccttgcctcctgatttcattgtgacccaccctgcaggtgcgcgtctataagatgcgcgtctatatcgtgcgcgtctatagactgcgcgtctatactatgcgcgtctataacttgcgcgtctatatgctgcgcgtctatagtatgcgcgtctataggcgcgccatgcttcatcagactct

SEQ ID NO: 12215 - DNA, 188 bp, Artificial Sequence; identical to SEQ ID NO: 12214
  Synthetic polynucleotide

SEQ ID NO: 12216 - DNA, 156 bp, Artificial Sequence
  Synthetic polynucleotide
atcatctcaccttgcctcctgacatgaaagagtccagtcctgcagggcacgtgtagagcacgtgttcggcacgtgtgacgcacgtgtctagcacgtgtactgcacgtgttgcgcacgtgtgtagcacgtgtggcgcgccatgcttcatcagactct

SEQ ID NO: 12217 - DNA, 156 bp, Artificial Sequence; identical to SEQ ID NO: 12216
  Synthetic polynucleotide

SEQ ID NO: 12218 - DNA, 188 bp, Artificial Sequence
  Synthetic polynucleotide
atcatctcaccttgcctcctgtcgaacactaagtgagtcctgcaggctctgattggttagactctgattggtttcgctctgattggttgacctctgattggttctactctgattggttactctctgattggtttgcctctgattggttgtactctgattggttggcgcgccatgcttcatcagactct

SEQ ID NO: 12219 - DNA, 188 bp, Artificial Sequence; identical to SEQ ID NO: 12218
  Synthetic polynucleotide

SEQ ID NO: 12220 - DNA, 172 bp, Artificial Sequence
  Synthetic polynucleotide
atcatctcaccttgcctcctgctattcgaacttaatcccctgcagggacatatgttagagacatatgtttcggacatatgttgacgacatatgttctagacatatgttactgacatatgtttgcgacatatgttgtagacatatgttggcgcgccatgcttcatcagactct

SEQ ID NO: 12221 - DNA, 172 bp, Artificial Sequence; identical to SEQ ID NO: 12220
  Synthetic polynucleotide

SEQ ID NO: 12222 - DNA, 196 bp, Artificial Sequence
  Synthetic polynucleotide
atcatctcaccttgcctcctgttgccaattgtacccgccctgcagggtgggattagtgaagagtgggattagtgatcggtgggattagtgagacgtgggattagtgactagtgggattagtgaactgtgggattagtgatgcgtgggattagtgagtagtgggattagtgaggcgcgccatgcttcatcagactct

SEQ ID NO: 12223 - DNA, 196 bp, Artificial Sequence; identical to SEQ ID NO: 12222
  Synthetic polynucleotide

SEQ ID NO: 12224 - DNA, 180 bp, Artificial Sequence
  Synthetic polynucleotide
atcatctcaccttgcctcctgccggttaggtgctgtctcctgcaggtgtttacttttagatgtttactttttcgtgtttacttttgactgtttacttttctatgtttacttttacttgtttactttttgctgtttacttttgtatgtttacttttggcgcgccatgcttcatcagactct

SEQ ID NO: 12225 - DNA, 180 bp, Artificial Sequence; identical to SEQ ID NO: 12224
  Synthetic polynucleotide

SEQ ID NO: 12226 - DNA, 180 bp, Artificial Sequence
  Synthetic polynucleotide
atcatctcaccttgcctcctgaatgcgctctccatttgcctgcagggtaaataaacaagagtaaataaacatcggtaaataaacagacgtaaataaacactagtaaataaacaactgtaaataaacatgcgtaaataaacagtagtaaataaacaggcgcgccatgcttcatcagactct

SEQ ID NO: 12227 - DNA, 180 bp, Artificial Sequence; identical to SEQ ID NO: 12226
  Synthetic polynucleotide

SEQ ID NO: 12228 - DNA, 197 bp, Artificial Sequence
  Synthetic polynucleotide
atcatctcaccttgcctcctgcactccgaccgcataaacctgcaggagcgccccctggtggccaagaagcgccccctggtggccatcgagcgccccctggtggccagacagcgccccctggtggccactaagcgccccctggtggccaactagcgccccctggtggccatgcggcgcgccatgcttcatcagactct

SEQ ID NO: 12229 - DNA, 197 bp, Artificial Sequence; identical to SEQ ID NO: 12228
  Synthetic polynucleotide

SEQ ID NO: 12230 - DNA, 197 bp, Artificial Sequence
  Synthetic polynucleotide
atcatctcaccttgcctcctggtttcagtgtagtgagtcctgcaggtttattactttgtttgtaagatttattactttgtttgtatcgtttattactttgtttgtagactttattactttgtttgtactatttattactttgtttgtaacttttattactttgtttgtatgcggcgcgccatgcttcatcagactct

SEQ ID NO: 12231 - DNA, 197 bp, Artificial Sequence; identical to SEQ ID NO: 12230
  Synthetic polynucleotide

SEQ ID NO: 12232 - DNA, 188 bp, Artificial Sequence
  Synthetic polynucleotide
atcatctcaccttgcctcctgaacaggatgacttagatcctgcaggtattgcgtaaccagatattgcgtaacctcgtattgcgtaaccgactattgcgtaaccctatattgcgtaaccacttattgcgtaacctgctattgcgtaaccgtatattgcgtaaccggcgcgccatgcttcatcagactct

SEQ ID NO: 12233 - DNA, 188 bp, Artificial Sequence; identical to SEQ ID NO: 12232
  Synthetic polynucleotide

SEQ ID NO: 12234 - DNA, 156 bp, Artificial Sequence
  Synthetic polynucleotide
atcatctcaccttgcctcctgcattaccggacgacgaacctgcagggcacgtgaagagcacgtgatcggcacgtgagacgcacgtgactagcacgtgaactgcacgtgatgcgcacgtgagtagcacgtgaggcgcgccatgcttcatcagactct

SEQ ID NO: 12235 - DNA, 156 bp, Artificial Sequence; identical to SEQ ID NO: 12234
  Synthetic polynucleotide

SEQ ID NO: 12236 - DNA, 197 bp, Artificial Sequence
  Synthetic polynucleotide
atcatctcaccttgcctcctgccatgtatacctttcatcctgcaggcaaagtaaacatggaagacaaagtaaacatggatcgcaaagtaaacatggagaccaaagtaaacatggactacaaagtaaacatggaactcaaagtaaacatggatgccaaagtaaacatggagtaggcgcgccatgcttcatcagactct

SEQ ID NO: 12237 - DNA, 197 bp, Artificial Sequence; identical to SEQ ID NO: 12236
  Synthetic polynucleotide

SEQ ID NO: 12238 - DNA, 196 bp, Artificial Sequence
  Synthetic polynucleotide
atcatctcaccttgcctcctggtctggttcattataggcctgcaggaggtcaaagtccaagaaggtcaaagtccatcgaggtcaaagtccagacaggtcaaagtccactaaggtcaaagtccaactaggtcaaagtccatgcaggtcaaagtccagtaaggtcaaagtccaggcgcgccatgcttcatcagactct

SEQ ID NO: 12239 - DNA, 196 bp, Artificial Sequence; identical to SEQ ID NO: 12238
  Synthetic polynucleotide

SEQ ID NO: 12240 - DNA, 180 bp, Artificial Sequence
  Synthetic polynucleotide
atcatctcaccttgcctcctgagccattagtttagccacctgcaggccagctgccccagaccagctgcccctcgccagctgccccgacccagctgccccctaccagctgccccactccagctgcccctgcccagctgccccgtaccagctgccccggcgcgccatgcttcatcagactct

SEQ ID NO: 12241 - DNA, 180 bp, Artificial Sequence; identical to SEQ ID NO: 12240
  Synthetic polynucleotide

SEQ ID NO: 12242 - DNA, 180 bp, Artificial Sequence
  Synthetic polynucleotide
atcatctcaccttgcctcctggacgacattggaggtaacctgcaggagcctcaggcaagaagcctcaggcatcgagcctcaggcagacagcctcaggcactaagcctcaggcaactagcctcaggcatgcagcctcaggcagtaagcctcaggcaggcgcgccatgcttcatcagactct

SEQ ID NO: 12243 - DNA, 180 bp, Artificial Sequence; identical to SEQ ID NO: 12242
  Synthetic polynucleotide

SEQ ID NO: 12244 - DNA, 164 bp, Artificial Sequence
  Synthetic polynucleotide
atcatctcaccttgcctcctggggtgctatctcacgctcctgcaggttaatgggtagattaatgggttcgttaatgggtgacttaatgggtctattaatgggtactttaatgggttgcttaatgggtgtattaatgggtggcgcgccatgcttcatcagactct

SEQ ID NO: 12245 - DNA, 164 bp, Artificial Sequence; identical to SEQ ID NO: 12244
  Synthetic polynucleotide

SEQ ID NO: 12246 - DNA, 156 bp, Artificial Sequence
  Synthetic polynucleotide
atcatctcaccttgcctcctgaaggttactttgaagggcctgcagggcacgtggagagcacgtggtcggcacgtgggacgcacgtggctagcacgtggactgcacgtggtgcgcacgtgggtagcacgtggggcgcgccatgcttcatcagactct

SEQ ID NO: 12247 - DNA, 156 bp, Artificial Sequence; identical to SEQ ID NO: 12246
  Synthetic polynucleotide

SEQ ID NO: 12248 - DNA, 190 bp, Artificial Sequence
  Synthetic polynucleotide
atcatctcaccttgcctcctgaaagaaggtcttctctacctgcagggaagccataacggcagagaagccataacggctcggaagccataacggcgacgaagccataacggcctagaagccataacggcactgaagccataacggctgcgaagccataacggcgtaggcgcgccatgcttcatcagactct

SEQ ID NO: 12249 - DNA, 190 bp, Artificial Sequence; identical to SEQ ID NO: 12248
  Synthetic polynucleotide

SEQ ID NO: 12250 - DNA, 190 bp, Artificial Sequence
  Synthetic polynucleotide
atcatctcaccttgcctcctgaacgtgggctatcgtgccctgcaggtggtcacgtgacggagatggtcacgtgacggtcgtggtcacgtgacgggactggtcacgtgacggctatggtcacgtgacggacttggtcacgtgacggtgctggtcacgtgacgggtaggcgcgccatgcttcatcagactct

SEQ ID NO: 12251 - DNA, 190 bp, Artificial Sequence; identical to SEQ ID NO: 12250
  Synthetic polynucleotide

SEQ ID NO: 12252 - DNA, 156 bp, Artificial Sequence
  Synthetic polynucleotide
atcatctcaccttgcctcctgggagtaagtcactttcgcctgcaggcatgtaatagacatgtaattcgcatgtaatgaccatgtaatctacatgtaatactcatgtaattgccatgtaatgtacatgtaatggcgcgccatgcttcatcagactct

SEQ ID NO: 12253 - DNA, 156 bp, Artificial Sequence; identical to SEQ ID NO: 12252
  Synthetic polynucleotide

SEQ ID NO: 12254 - DNA, 185 bp, Artificial Sequence
  Synthetic polynucleotide
atcatctcaccttgcctcctggaatcggactttgagtacctgcaggatttgcataacaatggagaatttgcataacaatggtcgatttgcataacaatgggacatttgcataacaatggctaatttgcataacaatggactatttgcataacaatggtgcggcgcgccatgcttcatcagactct

SEQ ID NO: 12255 - DNA, 185 bp, Artificial Sequence; identical to SEQ ID NO: 12254
  Synthetic polynucleotide

SEQ ID NO: 12256 - DNA, 180 bp, Artificial Sequence
  Synthetic polynucleotide
atcatctcaccttgcctcctggcacggtcaattctagacctgcaggggtataaattcagaggtataaattctcgggtataaattcgacggtataaattcctaggtataaattcactggtataaattctgcggtataaattcgtaggtataaattcggcgcgccatgcttcatcagactct

SEQ ID NO: 12257 - DNA, 180 bp, Artificial Sequence; identical to SEQ ID NO: 12256
  Synthetic polynucleotide

SEQ ID NO: 12258 - DNA, 197 bp, Artificial Sequence
  Synthetic polynucleotide
atcatctcaccttgcctcctgtttacttcgaaactcctcctgcaggtgacctttgcttgaccttagatgacctttgcttgacctttcgtgacctttgcttgaccttgactgacctttgcttgaccttctatgacctttgcttgaccttacttgacctttgcttgacctttgcggcgcgccatgcttcatcagactct

SEQ ID NO: 12259 - DNA, 197 bp, Artificial Sequence; identical to SEQ ID NO: 12258
  Synthetic polynucleotide

SEQ ID NO: 12260 - DNA, 196 bp, Artificial Sequence
  Synthetic polynucleotide
atcatctcaccttgcctcctgagtgatggagtaacatacctgcaggtgctgactcagcaagatgctgactcagcatcgtgctgactcagcagactgctgactcagcactatgctgactcagcaacttgctgactcagcatgctgctgactcagcagtatgctgactcagcaggcgcgccatgcttcatcagactct

SEQ ID NO: 12261 - DNA, 196 bp, Artificial Sequence; identical to SEQ ID NO: 12260
  Synthetic polynucleotide

SEQ ID NO: 12262 - DNA, 191 bp, Artificial Sequence
  Synthetic polynucleotide
atcatctcaccttgcctcctgatggactgtcagggttgcctgcaggaaaatgctgactcagcattttagaaaaatgctgactcagcatttttcgaaaatgctgactcagcattttgacaaaatgctgactcagcattttctaaaaatgctgactcagcattttactggcgcgccatgcttcatcagactct

SEQ ID NO: 12263 - DNA, 191 bp, Artificial Sequence; identical to SEQ ID NO: 12262
  Synthetic polynucleotide
